(19) United States
(12) Patent Application Publication
(10) Pub. No.: US 2003/0232975 A1
(43) Pub. Date: Dec. 18, 2003

(54) Nucleic acids, proteins, and antibodies

(75) Inventors: Craig A. Rosen, Laytonsville, MD (US); Steven M. Ruben, Olney, MD (US); Steven C. Barash, Rockville, MD (US)

Correspondence Address: HUMAN GENOME SCIENCES INC, 9410 KEY WEST AVENUE, ROCKVILLE, MD, 20850

(73) Assignee: Human Genome Sciences, Inc., Rockville, MD

(21) Appl. No.: 10/074,024

(22) Filed: Feb. 14, 2002

Related U.S. Application Data
(63) Continuation of application No. 09/764,895, filed on Jan. 17, 2001, now abandoned.
(60) Provisional application No. 60/179,065, filed on Jan. 31, 2000.
(60) Provisional application No. 60/180,628, filed on Feb. 4, 2000.
(60) Provisional application No. 60/214,886, filed on Jun. 28, 2000.
(60) Provisional application No. 60/217,487, filed on Jul. 11, 2000.
(60) Provisional application No. 60/225,758, filed on Aug. 14, 2000.
(60) Provisional application No. 60/220,963, filed on Jul. 26, 2000.
(60) Provisional application No. 60/217,496, filed on Jul. 11, 2000.
(60) Provisional application No. 60/225,447, filed on Aug. 14, 2000.
(60) Provisional application No. 60/218,290, filed on Jul. 14, 2000.
(60) Provisional application No. 60/225,757, filed on Aug. 14, 2000.
(60) Provisional application No. 60/226,868, filed on Aug. 22, 2000.
(60) Provisional application No. 60/216,647, filed on Jul. 7, 2000.
(60) Provisional application No. 60/225,267, filed on Aug. 14, 2000.
(60) Provisional application No. 60/216,880, filed on Jul. 7, 2000.
(60) Provisional application No. 60/225,270, filed on Aug. 14, 2000.
(60) Provisional application No. 60/251,869, filed on Dec. 8, 2000.
(60) Provisional application No. 60/235,834, filed on Sep. 27, 2000.
(60) Provisional application No. 60/234,274, filed on Sep. 21, 2000.
(60) Provisional application No. 60/234,223, filed on Sep. 21, 2000.
(60) Provisional application No. 60/228,924, filed on Aug. 30, 2000.
(60) Provisional application No. 60/224,518, filed on Aug. 14, 2000.
(60) Provisional application No. 60/236,369, filed on Sep. 29, 2000.
(60) Provisional application No. 60/224,519, filed on Aug. 14, 2000.
(60) Provisional application No. 60/220,964, filed on Jul. 26, 2000.
(60) Provisional application No. 60/241,809, filed on Oct. 20, 2000.
(60) Provisional application No. 60/249,299, filed on Nov. 17, 2000.
(60) Provisional application No. 60/236,327, filed on Sep. 29, 2000.
(60) Provisional application No. 60/241,785, filed on Oct. 20, 2000.
(60) Provisional application No. 60/244,617, filed on Nov. 1, 2000.
(60) Provisional application No. 60/225,268, filed on Aug. 14, 2000.
(60) Provisional application No. 60/236,368, filed on Sep. 29, 2000.
(60) Provisional application No. 60/251,856, filed on Dec. 8, 2000.
(60) Provisional application No. 60/251,868, filed on Dec. 8, 2000.
(60) Provisional application No. 60/229,344, filed on Sep. 1, 2000.
(60) Provisional application No. 60/234,997, filed on Sep. 25, 2000.
(60) Provisional application No. 60/229,343, filed on Sep. 1, 2000.
(60) Provisional application No. 60/229,345, filed on Sep. 1, 2000.
(60) Provisional application No. 60/229,287, filed on Sep. 1, 2000.
(60) Provisional application No. 60/229,513, filed on Sep. 5, 2000.
(60) Provisional application No. 60/231,413, filed on Sep. 8, 2000.
(60) Provisional application No. 60/229,509, filed on Sep. 5, 2000.
(60) Provisional application No. 60/236,367, filed on Sep. 29, 2000.
(60) Provisional application No. 60/237,039, filed on Oct. 2, 2000.
(60) Provisional application No. 60/237,038, filed on Oct. 2, 2000.
(60) Provisional application No. 60/236,370, filed on Sep. 29, 2000.
(60) Provisional application No. 60/236,802, filed on Oct. 2, 2000.
(60) Provisional application No. 60/237,037, filed on Oct. 2, 2000.
(60) Provisional application No. 60/237,040, filed on Oct. 2, 2000.
(60) Provisional application No. 60/240,960, filed on Oct. 20, 2000.
(60) Provisional application No. 60/239,935, filed on Oct. 13, 2000.
(60) Provisional application No. 60/239,937, filed on Oct. 13, 2000.
(60) Provisional application No. 60/241,787, filed on Oct. 20, 2000.
(60) Provisional application No. 60/246,474, filed on Nov. 8, 2000.
(60) Provisional application No. 60/246,532, filed on Nov. 8, 2000.
(60) Provisional application No. 60/249,216, filed on Nov. 17, 2000.
(60) Provisional application No. 60/249,210, filed on Nov. 17, 2000.
(60) Provisional application No. 60/226,681, filed on Aug. 22, 2000.
(60) Provisional application No. 60/225,759, filed on Aug. 14, 2000.
(60) Provisional application No. 60/225,213, filed on Aug. 14, 2000.
(60) Provisional application No. 60/227,182, filed on Aug. 22, 2000.
(60) Provisional application No. 60/225,214, filed on Aug. 14, 2000.
(60) Provisional application No. 60/235,836, filed on Sep. 27, 2000.
(60) Provisional application No. 60/230,438, filed on Sep. 6, 2000.
(60) Provisional application No. 60/215,135, filed on Jun. 30, 2000.
(60) Provisional application No. 60/225,266, filed on Aug. 14, 2000.
(60) Provisional application No. 60/249,218, filed on Nov. 17, 2000.
(60) Provisional application No. 60/249,208, filed on Nov. 17, 2000.
(60) Provisional application No. 60/249,213, filed on Nov. 17, 2000.
(60) Provisional application No. 60/249,212, filed on Nov. 17, 2000.
(60) Provisional application No. 60/249,207, filed on Nov. 17, 2000.
(60) Provisional application No. 60/249,245, filed on Nov. 17, 2000.
(60) Provisional application No. 60/249,244, filed on Nov. 17, 2000.
(60) Provisional application No. 60/249,217, filed on Nov. 17, 2000.
(60) Provisional application No. 60/249,211, filed on Nov. 17, 2000.
(60) Provisional application No. 60/249,215, filed on Nov. 17, 2000.
(60) Provisional application No. 60/249,264, filed on Nov. 17, 2000.
(60) Provisional application No. 60/249,214, filed on Nov. 17, 2000.
(60) Provisional application No. 60/249,297, filed on Nov. 17, 2000.
(60) Provisional application No. 60/232,400, filed on Sep. 14, 2000.
(60) Provisional application No. 60/231,242, filed on Sep. 8, 2000.
(60) Provisional application No. 60/232,081, filed on Sep. 8, 2000.
(60) Provisional application No. 60/232,080, filed on Sep. 8, 2000.
(60) Provisional application No. 60/231,414, filed on Sep. 8, 2000.
(60) Provisional application No. 60/231,244, filed on Sep. 8, 2000.
(60) Provisional application No. 60/233,064, filed on Sep. 14, 2000.
(60) Provisional application No. 60/233,063, filed on Sep. 14, 2000.
(60) Provisional application No. 60/232,397, filed on Sep. 14, 2000.
(60) Provisional application No. 60/232,399, filed on Sep. 14, 2000.
(60) Provisional application No. 60/232,401, filed on Sep. 14, 2000.
(60) Provisional application No. 60/241,808, filed on Oct. 20, 2000.
(60) Provisional application No. 60/241,826, filed on Oct. 20, 2000.
(60) Provisional application No. 60/241,786, filed on Oct. 20, 2000.
(60) Provisional application No. 60/241,221, filed on Oct. 20, 2000.
(60) Provisional application No. 60/246,475, filed on Nov. 8, 2000.
(60) Provisional application No. 60/231,243, filed on Sep. 8, 2000.
(60) Provisional application No. 60/233,065, filed on Sep. 14, 2000.
(60) Provisional application No. 60/232,398, filed on Sep. 14, 2000.
(60) Provisional application No. 60/234,998, filed on Sep. 25, 2000.
(60) Provisional application No. 60/246,477, filed on Nov. 8, 2000.
(60) Provisional application No. 60/246,528, filed on Nov. 8, 2000.
(60) Provisional application No. 60/246,525, filed on Nov. 8, 2000.
(60) Provisional application No. 60/246,476, filed on Nov. 8, 2000.
(60) Provisional application No. 60/246,526, filed on Nov. 8, 2000.
(60) Provisional application No. 60/249,209, filed on Nov. 17, 2000.
(60) Provisional application No. 60/246,527, filed on Nov. 8, 2000.
(60) Provisional application No. 60/246,523, filed on Nov. 8, 2000.
(60) Provisional application No. 60/246,524, filed on Nov. 8, 2000.
(60) Provisional application No. 60/246,478, filed on Nov. 8, 2000.
(60) Provisional application No. 60/246,609, filed on Nov. 8, 2000.
(60) Provisional application No. 60/246,613, filed on Nov. 8, 2000.
(60) Provisional application No. 60/249,300, filed on Nov. 17, 2000.
(60) Provisional application No. 60/249,265, filed on Nov. 17, 2000.
(60) Provisional application No. 60/246,610, filed on Nov. 8, 2000.
(60) Provisional application No. 60/246,611, filed on Nov. 8, 2000.
(60) Provisional application No. 60/230,437, filed on Sep. 6, 2000.
(60) Provisional application No. 60/251,990, filed on Dec. 8, 2000.
(60) Provisional application No. 60/251,988, filed on Dec. 5, 2000.
(60) Provisional application No. 60/251,030, filed on Dec. 5, 2000.
(60) Provisional application No. 60/251,479, filed on Dec. 6, 2000.
(60) Provisional application No. 60/256,719, filed on Dec. 5, 2000.
(60) Provisional application No. 60/250,160, filed on Dec. 1, 2000.
(60) Provisional application No. 60/251,989, filed on Dec. 8, 2000.
(60) Provisional application No. 60/250,391, filed on Dec. 1, 2000.
(60) Provisional application No. 60/254,097, filed on Dec. 11, 2000.
(60) Provisional application No. 60/231,968, filed on Sep. 12, 2000.
(60) Provisional application No. 60/226,279, filed on Aug. 18, 2000.
(60) Provisional application No. 60/186,350, filed on Mar. 2, 2000.
(60) Provisional application No. 60/184,664, filed on Feb. 24, 2000.
(60) Provisional application No. 60/189,874, filed on Mar. 16, 2000.
(60) Provisional application No. 60/198,123, filed on Apr. 18, 2000.
(60) Provisional application No. 60/227,009, filed on Aug. 23, 2000.
(60) Provisional application No. 60/235,484, filed on Sep. 26, 2000.
(60) Provisional application No. 60/190,076, filed on Mar. 17, 2000.
(60) Provisional application No. 60/209,467, filed on Jun. 7, 2000.
(60) Provisional application No. 60/205,515, filed on May 19, 2000.
(60) Provisional application No. 60/259,678, filed on Jan. 5, 2001.

(51) Int. Cl. C07H 21/00; C07K 1/00; C12Q 1/68; G01N 33/53

(52) U.S. Cl. 536/23.1; 530/350; 435/6; 435/7.1

(57) ABSTRACT

The present invention relates to novel endocrine related polynucleotides and the polypeptides encoded by these polynucleotides herein collectively known as “endocrine antigens,” and the use of such endocrine antigens for detecting disorders of the endocrine system, particularly the presence of cancers of the endocrine system and endocrine cancer metastases. More specifically, isolated endocrine associated nucleic acid molecules are provided encoding novel endocrine associated polypeptides. Novel endocrine polypeptides and antibodies that bind to these polypeptides are provided. Also provided are vectors, host cells, and recombinant and synthetic methods for producing human endocrine associated polynucleotides and/or polypeptides. The invention further relates to diagnostic and therapeutic methods useful for diagnosing, treating, preventing and/or prognosing disorders related to the endocrine system, including cancers of the endocrine system, and therapeutic methods for treating such disorders. The invention further relates to screening methods for identifying agonists and antagonists of polynucleotides and polypeptides of the invention. The present invention further relates to methods and/or compositions for inhibiting the production and function of the polypeptides of the present invention.

### STATEMENT Under 37 C.F.R. 1.77(b)(4)

[0001] This application refers to a “Sequence Listing” listed below, which is provided as an electronic document on two identical compact discs (CD-R), labeled “Copy I” and “Copy 2.” These compact discs each contain the file “PC001C1 seqlist.txt” (2,033,748 bytes, created on Feb. 13, 2002), which is hereby incorporated in its entirety herein.

[0002] The Sequence Listing may be viewed on an IBM-PC machine running the MS-Windows operating system.

### FIELD OF THE INVENTION

[0003] The present invention relates to novel endocrine related polynucleotides, the polypeptides encoded by these polynucleotides herein collectively referred to as “endocrine antigens,” and antibodies that immunospecifically bind these polypeptides, and the use of such endocrine polynucleotides, antigens, and antibodies for detecting, treating, preventing and/or prognosing disorders of the endocrine system, including, but not limited to, the presence of endocrine cancer and endocrine cancer metastases. More specifically, isolated endocrine nucleic acid molecules are provided encoding novel endocrine polypeptides. Novel endocrine polypeptides and antibodies that bind to these polypeptides are provided. Also provided are vectors, host cells, and recombinant and synthetic methods for producing human endocrine polynucleotides, polypeptides, and/or antibodies. The invention further relates to diagnostic and therapeutic methods useful for diagnosing, treating, preventing and/or prognosing disorders related to the endocrine system, including endocrine cancer, and therapeutic methods for treating such disorders. The invention further relates to screening methods for identifying agonists and antagonists of polynucleotides and polypeptides of the invention. The invention further relates to methods and/or compositions for inhibiting or promoting the production and/or function of the polypeptides of the invention.

### BACKGROUND OF THE INVENTION

[0004] The Human Endocrine System is a collection of specialized organs and body tissues that produce, store, and secrete hormones. Endocrine organs are important in regulating the body's growth and development, controlling the function of various tissues, supporting pregnancy and other reproductive functions, and regulating metabolism.

[0005] Endocrine organs are sometimes called ductless glands because they have no ducts connecting them to specific body parts. The hormones they secrete are released into the bloodstream. The primary glands that make up the human endocrine system are the hypothalamus, the pituitary gland, the thyroid gland, the parathyroid glands, the islets of the pancreas (which produce insulin), the adrenal glands, the ovaries and the testes. During pregnancy, the placenta also acts as an endocrine gland in addition to its other functions. Hormones secreted by these glands control physical growth, sexual function, metabolism, and other functions.

[0006] Most hormones are proteins composed of amino acid chains of varying length. Others are steroids, fatty substances derived from cholesterol. Very small amounts of hormones can trigger very large responses in the body. Hormones bind to receptors on a cell's surface or inside a cell. The binding of a hormone to a receptor speeds up, slows down, or in some other way alters the cell's function. Ultimately, hormones control the function of entire organs. They control growth and development, reproduction, and sexual characteristics. They influence the way the body uses and stores energy. Hormones also control the volume of fluid and the levels of salt and sugar in the blood. Some hormones affect only one or two organs, while others affect the whole body. For example, thyroid-stimulating hormone is produced in the pituitary gland and affects only the thyroid gland. In contrast, thyroid hormone is produced in the thyroid gland, but it affects cells throughout the body. Insulin, produced by the islet cells of the pancreas, affects the metabolism of glucose, protein, and fat throughout the body.

[0007] Endocrine system or hormone imbalance disorders are classified in two ways: disturbances in the production of hormones, and the inability of tissues to respond to hormones. The first type, called production disorders, are divided into hypofunction (insufficient activity) and hyperfunction (excess activity). Hypofunction disorders can have a variety of causes, including malformations in the gland itself. More commonly, hypofunction is caused by disease or injury. Hypofunction can also result when target tissue is unable to respond to hormones. Hyperfunction can be caused by glandular tumors that secrete hormone without responding to feedback controls. In addition, some autoimmune conditions create antibodies that have the side effect of stimulating hormone production. Infection of an endocrine gland can have the same result. Many of the endocrine disorders that affect adults also affect children but may produce different symptoms.

[0008] The pituitary gland, a pea-sized gland at the base of the brain, produces a number of hormones, such as corticotropin, thyroid-stimulating hormone, follicle-stimulating hormone, and luteinizing hormone, which control the function of other endocrine glands and stimulate these glands to produce other hormones.

[0009] Luteinizing hromone (lutropin, LH), and follicle-stimulating hormone (follitropin, FSH), as well as the related. placental hormone, chorionic gonadotropin (choriogonadotropin, CG), are referred to as gonadotropic hormones because of their actions on gonadal cells. The primary physiological effect of the gonadotropins is the promotion of gametogenesis and/or gonadal steroid production. Quantitative analyses of plasma LH and FSH levels, as determined by radioimmunoassays and/or bioassays specific for each hormone, are useful in the diagnoses of several reproductive disorders. In both males and females, low or undetectable levels of LH and FSH are indicative of hypogonadotropic hypogonadism and suggest hypothalamic disease or pituitary failure.

[0010] Growth hormone, another pituitary hormone, ensures growth during childhood. In pituitary dwarfism, the pituitary gland produces inadequate amounts of growth hormone, which cause abnormally slow growth and short stature with normal proportions. Most short children, however, have normally functioning pituitary glands and are short because their growth spurt is late or their parents are relatively short.

[0011] If the pituitary gland malfunctions before puberty, growth is delayed, sexual characteristics do not develop, and the thyroid and adrenal glands function inadequately. After puberty, pituitary malfunction can cause decreased sex drive, impotence, and shrinking of the testes. Inadequate pituitary function is called hypopituitarism. In children, hypopituitarism may be caused by a noncancerous pituitary tumor (craniopharyngioma), an injury, or an infection, or it may have no identifiable cause (idiopathic hypopituitarism). Rarely, hypopituitarism occurs as part of Hand-Schüller-Christian disease, which affects small areas of bone and lungs and the function of the pituitary gland.

[0012] In panhypopituitarism, the production of all pituitary hormones decreases or stops. This disorder can result when the entire pituitary gland is damaged.

[0013] Sometimes only one pituitary hormone is missing. For example, if only luteinizing hormone is missing (isolated luteinizing hormone deficiency), the testes develop and produce sperm, because these functions are controlled by follicle-stimulating hormone, but the testes do not produce enough testosterone. Testosterone is the hormone that stimulates the development of male secondary sexual characteristics, such as deepening of the voice, growth of facial hair, and maturation of the penis. Consequently, boys who have isolated luteinizing hormone deficiency do not develop these characteristics. Abnormally long arms and legs may be another symptom of this deficiency.

[0014] The thyroid gland produces thyroid hormone, which controls the speed at which the body's chemical functions proceed (metabolic rate). Thyroid hormones are the best known iodine-containing compounds with biological function. They have two functions in the human: as a crucial determinant of normal development (especially of the central nervous system) and in adults, to maintain metabolic homeostasis. Thyroid disorders are common with two general presentations: changes in the shape and/or size of the gland, or changes in secretion of hormones from the gland.

[0015] Thyroid nodules and goiter are the most common endocrinopathies and can be caused by benign and malignant tumors. A goiter may exist if the thyroid gland is underactive (producing too little thyroid hormone) or overactive (producing too much). An enlarged thyroid gland present at birth is called congenital goiter. Some children have Pendred's syndrome, a hereditary condition that combines deaf-mutism and congenital goiter.

[0016] Hypothyroidism, or myxedema when severe, results when the thyroid gland cannot produce adequate amounts of thyroid hormone for the body's needs. Worldwide, hypothyroidism is most often the result of iodine deficiency. In nonendemic areas where iodine is sufficient, chronic autoimmune thyroiditis (Hashimoto's thyroiditis) accounts for the majority of cases. Hypothyroidism present at birth is known as congenital hypothyroidism and is the most common preventable cause of mental retardation in the world. Diagnosis and early intervention with thyroid hormone replacement prevent the development of cretinism. Hypothyroidism that begins in childhood (juvenile hypothyroidism) slows growth, sometimes resulting in disproportionately short limbs. Tooth development is delayed. Hypothyroidism that begins in adolescence (adolescent hypothyroidism) is similar to that in adults, except that it may delay puberty. Symptoms include a hoarse voice, slowed speech, droopy eyelids, a puffy face, hair loss, dry skin, a slow pulse, and weight gain.

[0017] Hyperthyroidism results from overactivity of the thyroid gland. In newborns, the most common cause of hyperthyroidism is neonatal Graves' disease, a potentially life-threatening illness that can occur in infants whose mothers have or have had Graves' disease. Graves' disease, a form of hyperthyroidism, is an autoimmune disorder in which the body produces antibodies that stimulate the thyroid gland. In pregnant women, these antibodies cross the placenta and stimulate the fetus' thyroid gland. Graves' disease in the mother may result in stillbirth, miscarriage, or premature birth. In a newborn, symptoms of an overactive thyroid gland—poor weight gain, fast heart rate, high blood pressure, nervousness or irritability, vomiting, and diarrhea—may start within several days after birth. The enlarged thyroid gland (goiter) can press on the windpipe and interfere with breathing. The high thyroid hormone levels cause the fast heart rate, which can lead to heart failure. Bulging eyes, common in the adult form of the disorder, also occur in newborns. Graves' disease is potentially fatal if not recognized and treated appropriately.

[0018] Islet cells of the pancreas synthesize and secrete insulin, the primary hormone responsible for controlling the uptake, utilization, and storage of cellular nutrients. One of the most common diseases of the endocrine system is diabetes mellitus. Most patients can be classified as having either insulin-dependent diabetes mellitus (type I diabetes) or non-insulin-dependent diabetes mellitus (type II diabetes). Virtually all forms of diabetes mellitus are due to a decrease in the circulating concentration of insulin and a decrease in the response of peripheral tissues to insulin. These abnormalities lead to alterations in the metabolism of charbohydrates, lipids, ketones, and amino acids; the central feature of the syndrome is hyperglycemia.

[0019] The two adrenal glands produce several types of hormones. The inner part (medulla) of each gland produces epinephrine and norepinephrine, which are responsible for the fight-or-flight reaction to danger and emotional stress. The outer part (adrenal cortex) produces two classes of steroids: the corticosteroids and the androgens. The actions of the corticosteroids are generally described as glucocorticoids (carbohydrate metabolism-regulating) and mineralocorticoid (electrolyte balance-regulating). In humans, hydrocortisone (cortisol) is the main glucocorticoid, and aldosterone is the main mineralocorticoid. The effects of corticosteroids are numerous and diverse and include: alterations in carbohydrate, protein, and lipid metabolism; maintenance of fluid and electrolyte balance; and preservation of normal function of the cardiovascular system, the immune system, the kidney, skeletal muscle, the endocrine system, and the nervous system.

[0020] Under normal conditions, the hypothalamus produces corticotropin-releasing hormone (CRH) which regulates secretion of adrenocorticotropic hormone (ACTH) from the pituitary gland. ACTH stimulates the adrenal cortex to secrete glucocorticoids, mineralocorticoids and weak androgens such as androstenedione and dehydroepiandrosterone, which can then be converted peripherally into more potent androgens.

[0021] Normal human reproduction involves the interaction of a variety of hormones and organs, orchestrated by the hypothalamus. In both females and males, the hypothalamus secretes hormones, called releasing factors, that stimulate the pituitary to release other hormones. For example, gonadotropin-releasing hormone, stimulates the pituitary to secrete luteinizing hormone and follicle-stimulating hormone. These hormones stimulate the reproductive glands to mature and to release sex hormones. The ovaries in women release estrogens and progesterone, and the testes in men release androgens such as testosterone. Sex hormones are also produced by the adrenal glands.

[0022] The testes have two main functions: synthesizing testosterone, the primary male sex hormone (androgen), and producing sperm. The testes may be underactive—a condition called male hypogonadism—because the pituitary gland does not secrete the hormones that are needed to stimulate the testes or because there is a problem within the testes. When the testes are underactive, androgen production is deficient. Growth and sexual development may be retarded, sperm production is low, and the penis may be small. The symptoms vary depending on the age at which the androgen deficiency begins.

[0023] Estrogens and progestins are endogenous hormones that produce numerous physiological actions. In women, these include, developmental effects, neuroendocrine actions involved in the control of ovulation, the cyclical preparation of the reproductive tract for fertilization and implantation, and major actions on mineral, charbohydrate, protein, and lipid metabolism. The ovaries are the principal source of circulating estrogen in premenopausal women. In men and postmenopausal women, the principal source of estrogen is adipose tissue stroma where estrone is synthesized from dehydroepiandrosterone, secreted by the adrenal cortex. Progesterone is secreted by the ovary mainly from the corpus luteum during the second half of the menstrual cycle. Progesterone is important for the maintenance of pregnancy. Even slight irregularities in the hormonal system (e.g., due to various medical conditions, lifestyle factors such as excessive exercise, eating disorders, or stress) can result in ovulation disorder.

[0024] A major cause of infertility in American women is polycystic ovary syndrome (Stein-Leventhal syndrome), a disorder in which the ovaries are enlarged and contain many fluid-filled sacs (cysts), and levels of androgens may be high. The ovary produces high levels of male hormones (androgens), particularly testosterone. LH levels are high and FSH levels are low, so the follicles are unable to produce a mature egg, instead they fill with fluid and form cysts. The elevated levels of androgens (hyperandrogenism) may result in increased facial hair and acne. The absence of periods (amenorrhea) and infrequent menstruation (oligomenorrhea) are quite common. Without ovulation, estrogen levels remain normal but progesterone is no longer produced. This imbalance also increases the risk for endometrial cancer. Other causes of infertility in women include premature ovarian failure because of adrenal or thyroid deficiencies. Certain autoimmune disorders, such as Hashimoto's hypothyroidism, may cause infertility and miscarriage.

[0025] Examples of proteins that may play a therapeutic and/or diagnostic role in diseases and/or disorders of the Endocrine system and/or diseases and/or disorders related to hormone imbalance include, but are not limited to, adrenocorticotropic hormone, alpha-amylase, androgen recptor, calcitonin, estrogen receptor, growth hormone, insulin, luteinizing hormone, thyroid hormone. For example, growth hormone is approved for replacement therapy in growth hormone deficient children. Recombinant growth hormone, or somatropin (HUMATROPE™) is identical to the hormone isolated from human pitutaries. Corticosteroids (e.g., prednisone, fludrocortisone or cortisol) are useful in treatment of Addison's disease. Hypothyroidism is treated by replacing the deficient thyroid hormone, using one of several different oral preparations. The preferred form is synthetic thyroid hormone, T4. Gonadotropins are increasingly being used for treatment of infertility. In males with hypogonadotropic hypogonadism, gonadotropin therapy can be used to achieve fertility. CG therapy can be used for cases of cryptorchidism (the failure of one or both testes to descend into the scrotum) that are not a result of anatomical blockage. Antagonists of CG are being explored for use in long term contraception methods in females. Insulin is the mainstay for treatmen of virtually all type I diabetes mellitus patients and many type II diabetes mellitus patients. Accordingly, there exists a need to identify and utilize novel proteins associated with the endocrine system and/or hormones and/or hormone antagonists.

[0026] The discovery of novel human endocrine system associated polynucleotides and the polypeptides encoded by them satisfies a need in the art by providing new compositions which are useful in the diagnosis, and treatment, prevention and/or prognosis of diseases or disorders of the endocrine system or hormone imbalance, including, but not limited to reproductive disorders (e.g. male and female infertility, male impotence, and premature labor), as well as disorders and/or cancers of endocrine tissues, including but not limited to, the pancreas (e.g., diabetes mellitus, diabetes insipidus, congenital pancreatic agenesis, pheochromocytoma—islet cell tumor syndrome); the adrenal glands (e.g., Addison's Disease, corticosteroid deficiency, virilizing disease, hirsutism, Cushing's Syndrome, hyperaldosteronism, pheochromocytomas); ovaries (e.g., ovarian cancer, polycystic ovary syndrome); the pituitary gland (e.g., hyper-, hypopituitarism, pituitary dwarfism, pituitary adenoma, panhypopituitarism, acromegaly, gigantism); the thyroid (e.g., hyper-, hypothyroidism, Plummer's Disease, Grave's Disease (toxic diffuse goiter), toxic nodular goiter, thyroiditis (Hashimoto's thyroiditis, subacute granulomatous thyroiditis, and silent lymphocytic thyroiditis), Pendred's Syndrome, myxedema coma, cretinism, thyrotoxicosis, thyroid hormone coupling defect, thymic aplasia, hurthle cell tumors of the thyroid, thyroid cancer, thyroid carcinoma, medullary thyroid carcinoma); the parathyroid gland (e.g., hyper-, hypoparathyroidism); the hypothallamus, and testes (e.g., Klinefelter's Syndrome, vanishing testes syndrome (bilateral anorchia), congenital absence of leydig's cells, cryptorchidism, Noonan's Syndrome, myotonic dystrophy, capillary haemangioma of the testis (benign), neoplasias of the testis and neo-testis) and/or as described under “Endocrine Disorders,” “Reproductive Disorders” and/or “Gastrointestinal Disorders” below.

### SUMMARY OF THE INVENTION

[0027] The present invention relates to novel endocrine related polynucleotides, the polypeptides encoded by these polynucleotides herein collectively referred to as “endocrine antigens,” and antibodies that immunospecifically bind these polypeptides, and the use of such endocrine polynucleotides, antigens, and antibodies for detecting, treating, preventing and/or prognosing disorders of the endocrine system, including, but not limited to, the presence of endocrine cancer and endocrine cancer metastases. More specifically, isolated endocrine nucleic acid molecules are provided encoding novel endocrine polypeptides. Novel endocrine polypeptides and antibodies that bind to these polypeptides are provided. Also provided are vectors, host cells, and recombinant and synthetic methods for producing human endocrine polynucleotides, polypeptides, and/or antibodies. The invention further relates to diagnostic and therapeutic methods useful for diagnosing, treating, preventing and/or prognosing disorders related to the endocrine system, including endocrine cancer, and therapeutic methods for treating such disorders. The invention further relates to screening methods for identifying agonists and antagonists of polynucleotides and polypeptides of the invention. The invention further relates to methods and/or compositions for inhibiting or promoting the production and/or function of the polypeptides of the invention.

### DETAILED DESCRIPTION

[0028] Tables

[0029] Table 1A summarizes some of the polynucleotides encompassed by the invention (including cDNA clones related to the sequences (Clone ID NO:Z), contig sequences (contig identifier (Contig ID:) and contig nucleotide sequence identifier (SEQ ID NO:X)) and further summarizes certain characteristics of these polynucleotides and the polypeptides encoded thereby. The first column provides a unique clone identifier, “Clone ID NO:Z”, for a cDNA plasmid related to each endocrine associated contig sequence disclosed in Table 1A. The second column provides a unique contig identifier, “Contig ID:” for each of the contig sequences disclosed in Table 1A. The third column provides the sequence identifier, “SEQ ID NO:X”, for each of the contig polynucleotide sequences disclosed in Table 1A. The fourth column, “ORF (From-To)”, provides the location (i.e., nucleotide position numbers) within the polynucleotide sequence of SEQ ID NO:X that delineate the preferred open reading frame (ORF) shown in the sequence listing and referenced in Table 1A as SEQ ID NO:Y (column 5). Column 6 lists residues comprising predicted epitopes contained in the polypeptides encoded by each of the preferred ORFs (SEQ ID NO:Y). Identification of potential immunogenic regions was performed according to the method of Jameson and Wolf (CABIOS, 4: 181-86 (1988)); specifically, the Genetics Computer Group (GCG) implementation of this algorithm, embodied in the program PEPTIDESTRUCTURE (Wisconsin Package v10.0, Genetics Computer Group (GCG), Madison, Wis.). This method returns a measure of the probability that a given residue is found on the surface of the protein. Regions where the antigenic index score is greater than 0.9 over at least 6 amino acids are indicated in Table 1A as “Predicted Epitopes.” In particular embodiments, endocrine associated polypeptides of the invention comprise, or alternatively consist of, one, two, three, four, five or more of the predicted epitopes described in Table 1A. It will be appreciated that depending on the analytical criteria used to predict antigenic determinants, the exact address of the determinant may vary slightly. Column 7, “Tissue Distribution” shows the expression profile of tissue, cells, and/or cell line libraries which express the polynucleotides of the invention. The first number in column 7 (preceding the colon), represents the tissue/cell source identifier code corresponding to the code and description provided in Table 4. Expression of these polynucleotides was not observed in the other tissues and/or cell libraries tested. For those identifier codes in which the first two letters are not “AR”, the second number in column 7 (following the colon) represents the number of times a sequence corresponding to the reference polynucleotide sequence (e.g., SEQ ID NO:X) was identified in the tissue/cell source. Those tissue/cell source identifier codes in which the first two letters are “AR” designate information generated using DNA array technology. Utilizing this technology, cDNAs were amplified by PCR and then transferred, in duplicate, onto the array. Gene expression was assayed through hybridization of first strand cDNA probes to the DNA array. cDNA probes were generated from total RNA extracted from a variety of different tissues and cell lines. Probe synthesis was performed in the presence of ³³P dCTP, using oligo(dT) to prime reverse transcription. After hybridization, high stringency washing conditions were employed to remove non-specific hybrids from the array. The remaining signal, emanating from each gene target, was measured using a Phosphorimager. Gene expression was reported as Phosphor Stimulating Luminescence (PSL) which reflects the level of phosphor signal generated from the probe hybridized to each of the gene targets represented on the array. A local background signal subtraction was performed before the total signal generated from each array was used to normalize gene expression between the different hybridizations. The value presented after “[array code]:” represents the mean of the duplicate values, following background subtraction and probe normalization. One of skill in the art could routinely use this information to identify normal and/or diseased tissue(s) which show a predominant expression pattern of the corresponding polynucleotide of the invention or to identify polynucleotides which show predominant and/or specific tissue and/or cell expression. Column 8, “Cytologic Band,” provides the chromosomal location of polynucleotides corresponding to SEQ ID NO:X. Chromosomal location was determined by finding exact matches to EST and cDNA sequences contained in the NCBI (National Center for Biotechnology information) UniGene database. Given a presumptive chromosomal location, disease locus association was determined by comparison with the Morbid Map, derived from Online Mendelian Inheritance in Man (Online Mendelian Inheritance in Man, OMIM™. McKusick-Nathans Institute for Genetic Medicine, Johns Hopkins University (Baltimore, Md.) and National Center for Biotechnology Information, National Library of Medicine (Bethesda, Md.) 2000. World Wide Web URL: http://www.ncbi.nlm.nih.gov/omim/). If the putative chromosomal location of the Query overlapped with the chromosomal location of a Morbid Map entry, an OMIM identification number is provided in Table 1A, column 9 labeled “OMIM Disease Reference(s)”. A key to the OMIM reference identification numbers is provided in Table 5.

[0030] Table 1B summarizes additional polynucleotides encompassed by the invention (including cDNA clones related to the sequences (Clone ID NO:Z), contig sequences (contig identifier (Contig ID:) contig nucleotide sequence identifiers (SEQ ID NO:X)), and genomic sequences (SEQ ID NO:B). The first column provides a unique clone identifier, “Clone ID NO:Z”, for a cDNA clone related to each contig sequence. The second column provides the sequence identifier, “SEQ ID NO:X”, for each contig sequence. The third column provides a unique contig identifier, “Contig ID:” for each contig sequence. The fourth column, provides a BAC identifier “BAC ID NO:A” for the BAC clone referenced in the corresponding row of the table. The fifth column provides the nucleotide sequence identifier, “SEQ ID NO:B” for a fragment of the BAC clone identified in column four of the corresponding row of the table. The sixth column, “Exon From-To”, provides the location (i.e., nucleotide position numbers) within the polynucleotide sequence of SEQ ID NO:B which delineate certain polynucleotides of the invention that are also exemplary members of polynucleotide sequences that encode polypeptides of the invention (e.g., polypeptides containing amino acid sequences encoded by the polynucleotide sequences delineated in column six, and fragments and variants thereof).

[0031] Table 2 summarizes homology and features of some of the polypeptides of the invention. The first column provides a unique clone identifier, “Clone ID NO:Z”, corresponding to a cDNA disclosed in Table 1A. The second column provides the unique contig identifier, “Contig ID:” corresponding to contigs in Table 1A and allowing for correlation with the information in Table 1A. The third column provides the sequence identifier, “SEQ ID NO:X”, for the contig polynucleotide sequences. The fourth column provides the analysis method by which the homology/identity disclosed in the row was determined. Comparisons were made between polypeptides encoded by the polynucleotides of the invention and either a non-redundant protein database (herein referred to as “NR”), or a database of protein families (herein referred to as “PFam”) as further described below. The fifth column provides a description of PFam/NR hits having significant matches to a polypeptide of the invention. Column six provides the accession number of the PFam/NR hit disclosed in the fifth column. Column seven, “Score/Percent Identity”, provides a quality score or the percent identity, of the hit disclosed in column five. Columns 8 and 9, “NT From” and “NT To” respectively, delineate the polynucleotides in “SEQ ID NO:X” that encode a polypeptide having a significant match to the PFam/NR database as disclosed in the fifth column. In specific embodiments, polypeptides of the invention comprise, or alternatively consist of, an amino acid sequence encoded by the polynucleotides in SEQ ID NO:X as delineated in columns 8 and 9, or fragments or variants thereof.

[0032] Table 3 provides polynucleotide sequences that may be disclaimed according to certain embodiments of the invention. The first column provides a unique clone identifier, “Clone ID NO:Z”, for a cDNA clone related to endocrine associated contig sequences disclosed in Table 1A. The second column provides the sequence identifier, “SEQ ID NO:X”, for contig polynucleotide sequences disclosed in Table 1A. The third column provides the unique contig identifier, “Contig ID”, for contigs disclosed in Table 1A. The fourth column provides a unique integer ‘a’ where ‘a’ is any integer between 1 and the final nucleotide minus 15 of SEQ ID NO:X, represented as “Range of a”, and the fifth column provides a unique integer ‘b’ where ‘b’ is any integer between 15 and the final nucleotide of SEQ ID NO:X, represented as “Range of b”, where both a and b correspond to the positions of nucleotide residues shown in SEQ ID NO:X, and where b is greater than or equal to a+14. For each of the polynucleotides shown as SEQ ID NO:X, the uniquely defined integers can be substituted into the general formula of a-b, and used to describe polynucleotides which may be preferably excluded from the invention. In certain embodiments, preferably excluded from the polynucleotides of the invention (including polynucleotide fragments and variants as described herein and diagnostic and/or therapeutic uses based on these polynucleotides) are at least one, two, three, four, five, ten, or more of the polynucleotide sequence(s) having the accession number(s) disclosed in the sixth column of this Table (including for example, published sequence in connection with a particular BAC clone). In further embodiments, preferably excluded from the invention are the specific polynucleotide sequence(s) contained in the clones corresponding to at least one, two, three, four, five, ten, or more of the available material having the accession numbers identified in the sixth column of this Table (including for example, the actual sequence contained in an identified BAC clone).

[0033] Table 4 provides a key to the tissue/cell source identifier code disclosed in Table 1A, column 7. Column 1 provides the key to the tissue/cell source identifier code disclosed in Table 1A, Column 7. Columns 2-5 provide a description of the tissue or cell source. Codes corresponding to diseased tissues are indicated in column 6 with the word “disease”. The use of the word “disease” in column 6 is non-limiting. The tissue or cell source may be specific (e.g. a neoplasm), or may be disease-associated (e.g., a tissue sample from a normal portion of a diseased organ). Furthermore, tissues and/or cells lacking the “disease” designation may still be derived from sources directly or indirectly involved in a disease state or disorder, and therefore may have a further utility in that disease state or disorder. In numerous cases where the tissue/cell source is a library, column 7 identifies the vector used to generate the library.

[0034] Table 5 provides a key to the OMIM™ reference identification numbers disclosed in Table 1A, column 9. OMIM reference identification numbers (Column 1) were derived from Online Mendelian Inheritance in Man (Online Mendelian Inheritance in Man, OMIM™. McKusick-Nathans Institute for Genetic Medicine, Johns Hopkins University (Baltimore, Md.) and National Center for Biotechnology Information, National Library of Medicine, (Bethesda, Md.) 2000. World Wide Web URL: http://www.ncbi.nlm.nih.gov/omim/). Column 2 provides diseases associated with the cytologic band disclosed in Table 1A, column 8, as determined from the Morbid Map database.

[0035] Table 6 summarizes ATCC Deposits, Deposit dates, and ATCC designation numbers of deposits made with the ATCC in connection with the present application.

[0036] Table 7 shows the cDNA libraries sequenced, tissue source description, vector information and ATCC designation numbers relating to these cDNA libraries.

[0037] Table 8 provides a physical characterization of clones encompassed by the invention. The first column provides the unique clone identifier, “Clone ID NO:Z”, for certain cDNA clones of the invention, as described in Table 1A. The second column provides the size of the cDNA insert contained in the corresponding cDNA clone.

[0038] Definitions

[0039] The following definitions are provided to facilitate understanding of certain terms used throughout this specification.

[0040] In the present invention, “isolated” refers to material removed from its original environment (e.g., the natural environment if it is naturally occurring), and thus is altered “by the hand of man” from its natural state. For example, an isolated polynucleotide could be part of a vector or a composition of matter, or could be contained within a cell, and still be “isolated” because that vector, composition of matter, or particular cell is not the original environment of the polynucleotide. The term “isolated” does not refer to genomic or cDNA libraries, whole cell total or mRNA preparations, genomic DNA preparations (including those separated by electrophoresis and transferred onto blots), sheared whole cell genomic DNA preparations or other compositions where the art demonstrates no distinguishing features of the polynucleotide sequences of the present invention.

[0041] As used herein, a “polynucleotide” refers to a molecule having a nucleic acid sequence encoding SEQ ID NO:Y or a fragment or variant thereof; a nucleic acid sequence contained in SEQ ID NO:X (as described in column 3 of Table 1A) or the complement thereof; a cDNA sequence contained in Clone ID NO:Z (as described in column 1 of Table 1A and contained within a library deposited with the ATCC); a nucleotide sequence encoding the polypeptide encoded by a nucleotide sequence in SEQ ID NO:B as defined in column 6 of Table 1B or a fragment or variant thereof; or a nucleotide coding sequence in SEQ ID NO:B as defined in column 6 of Table 1B or the complement thereof. For example, the polynucleotide can contain the nucleotide sequence of the full length cDNA sequence, including the 5′ and 3′ untranslated sequences, the coding region, as well as fragments, epitopes, domains, and variants of the nucleic acid sequence. Moreover, as used herein, a “polypeptide” refers to a molecule having an amino acid sequence encoded by a polynucleotide of the invention as broadly defined (obviously excluding poly-Phenylalanine or poly-Lysine peptide sequences which result from translation of a polyA tail of a sequence corresponding to a cDNA).

[0042] As used herein, an “endocrine antigen” refers collectively to any polynucleotide disclosed herein (e.g., a nucleic acid sequence contained in SEQ ID NO:X or the complement therof, or cDNA sequence contained in Clone ID NO:Z, or a nucleotide sequence encoding the polypeptide encoded by a nucleotide sequence in SEQ ID NO:B as defined in column 6 of Table 1B, or a nucleotide coding sequence in SEQ ID NO:B as defined in column 6 of Table 1B or the complement thereof and fragments or variants thereof as described herein) or any polypeptide disclosed herein (e.g., an amino acid sequence contained in SEQ ID NO:Y, an amino acid sequence encoded by SEQ ID NO:X, or the complement thereof, an amino acid sequence encoded by the cDNA sequence contained in Clone ID NO:Z, an amino acid sequence encoded by SEQ ID NO:B, or the complement thereof, and fragments or variants thereof as described herein). These endocrine antigens have been determined to be predominantly expressed in endocrine system tissues, including normal or diseased tissues (as shown in Table 1A column 7 and Table 4).

[0043] In the present invention, “SEQ ID NO:X” was often generated by overlapping sequences contained in multiple clones (contig analysis). A representative clone containing all or most of the sequence for SEQ ID NO:X is deposited at Human Genome Sciences, Inc. (HGS) in a catalogued and archived library. As shown, for example, in column 1 of Table 1A, each clone is identified by a cDNA Clone ID (identifier generally referred to herein as Clone ID NO:Z). Each Clone ID is unique to an individual clone and the Clone ID is all the information needed to retrieve a given clone from the HGS library. Furthermore, certain clones disclosed in this application have been deposited with the ATCC on Oct. 5, 2000, having the ATCC designation numbers PTA 2574 and PTA 2575; and on Jan. 5, 2001, having the depositor reference numbers TS-1, TS-2, AC-1, and AC-2. In addition to the individual cDNA clone deposits, most of the cDNA libraries from which the clones were derived were deposited at the American Type Culture Collection (hereinafter “ATCC”). Table 7 provides a list of the deposited cDNA libraries. One can use the Clone ID NO:Z to determine the library source by reference to Tables 6 and 7. Table 7 lists the deposited cDNA libraries by name and links each library to an ATCC Deposit. Library names contain four characters, for example, “HTWE.” The name of a cDNA clone (Clone ID NO:Z) isolated from that library begins with the same four characters, for example “HTWEP07”. As mentioned below, Table 1A correlates the Clone ID NO:Z names with SEQ ID NO:X. Thus, starting with an SEQ ID NO:X, one can use Tables 1A, 6 and 7 to determine the corresponding Clone ID NO:Z, which library it came from and which ATCC deposit the library is contained in. Furthermore, it is possible to retrieve a given cDNA clone from the source library by techniques known in the art and described elsewhere herein. The ATCC is located at 10801 University Boulevard, Manassas, Va. 20110-2209, USA. The ATCC deposits were made pursuant to the terms of the Budapest Treaty on the international recognition of the deposit of microorganisms for the purposes of patent procedure.

[0044] In specific embodiments, the polynucleotides of the invention are at least 15, at least 30, at least 50, at least 100, at least 125, at least 500, or at least 1000 continuous nucleotides but are less than or equal to 300 kb, 200 kb, 100 kb, 50 kb, 15 kb, 10 kb, 7.5 kb, 5 kb, 2.5 kb, 2.0 kb, or 1 kb, in length. In a further embodiment, polynucleotides of the invention comprise a portion of the coding sequences, as disclosed herein, but do not comprise all or a portion of any intron. In another embodiment, the polynucleotides comprising coding sequences do not contain coding sequences of a genomic flanking gene (i.e., 5′ or 3′ to the gene of interest in the genome). In other embodiments, the polynucleotides of the invention do not contain the coding sequence of more than 1000, 500, 250, 100, 50, 25, 20, 15, 10, 5, 4, 3, 2, or 1 genomic flanking gene(s).

[0045] A “polynucleotide” of the present invention also includes those polynucleotides capable of hybridizing, under stringent hybridization conditions, to sequences contained in SEQ ID NO:X, or the complement thereof (e.g., the complement of any one, two, three, four, or more of the polynucleotide fragments described herein), the polynucleotide sequence delineated in columns 8 and 9 of Table 2 or the complement thereof, and/or cDNA sequences contained in Clone ID NO:Z (e.g., the complement of any one, two, three, four, or more of the polynucleotide fragments, or the cDNA clone within the pool of cDNA clones deposited with the ATCC, described herein) and/or the polynucleotide sequence delineated in column 6 of Table 1B or the complement thereof. “Stringent hybridization conditions” refers to an overnight incubation at 42 degree C. in a solution comprising 50% formamide, 5×SSC (750 mM NaCl, 75 mM trisodium citrate), 50 mM sodium phosphate (pH 7.6), 5× Denhardt's solution, 10% dextran sulfate, and 20 μg/ml denatured, sheared salmon sperm DNA, followed by washing the filters in b. 1×SSC at about 65 degree C.

[0046] Also contemplated are nucleic acid molecules that hybridize to the polynucleotides of the present invention at lower stringency hybridization conditions. Changes in the stringency of hybridization arid, signal detection are primarily accomplished through the manipulation of formamide concentration (lower percentages of formamide result in lowered stringency), salt conditions, or temperature. For example, lower stringency conditions include an overnight incubation at 37 degree C. in a solution comprising 6×SSPE (20×SSPE=3M NaCl; 0.2M NaH₂PO₄; 0.02M EDTA, pH 7.4), 0.5% SDS, 30% formamide, 100 ug/ml salmon sperm blocking DNA; followed by washes at 50 degree C. with 1×SSPE, 0.1% SDS. In addition, to achieve even lower stringency, washes performed following stringent hybridization can be done at higher salt concentrations (e.g. 5×SSC).

[0047] Note that variations in the above conditions may be accomplished through the inclusion and/or substitution of alternate blocking reagents used to suppress background in hybridization experiments. Typical blocking reagents include Denhardt's reagent, BLOTTO, heparin, denatured salmon sperm DNA, and commercially available proprietary formulations. The inclusion of specific blocking reagents may require modification of the hybridization conditions described above, due to problems with compatibility.

[0048] Of course, a polynucleotide which hybridizes only to polyA+ sequences (such as any 3′ terminal polyA+ tract of a cDNA shown in the sequence listing), or to a complementary stretch of T (or U) residues, would not be included in the definition of “polynucleotide,” since such a polynucleotide would hybridize to any nucleic acid molecule containing a poly (A) stretch or the complement thereof (e.g., practically any double-stranded cDNA clone generated using oligo dT as a primer).

[0049] The polynucleotide of the present invention can be composed of any polyribonucleotide or polydeoxribonucleotide, which may be unmodified RNA or DNA or modified RNA or DNA. For example, polynucleotides can be composed of single- and double-stranded DNA, DNA that is a mixture of single- and double-stranded regions, single- and double-stranded RNA, and RNA that is mixture of single- and double-stranded regions, hybrid molecules comprising DNA and RNA that may be single-stranded or, more typically, double-stranded or a mixture of single- and double-stranded regions. In addition, the polynucleotide can be composed of triple-stranded regions comprising RNA or DNA or both RNA and DNA. A polynucleotide may also contain one or more modified bases or DNA or RNA backbones modified for stability or for other reasons. “Modified” bases include, for example, tritylated bases and unusual bases such as inosine. A variety of modifications can be made to DNA and RNA; thus, “polynucleotide” embraces chemically, enzymatically, or metabolically modified forms.

[0050] The polypeptide of the present invention can be composed of amino acids joined to each other by peptide bonds or modified peptide bonds, i.e., peptide isosteres, and may contain amino acids other than the 20 gene-encoded amino acids. The polypeptides may be modified by either natural processes; such as posttranslational processing, or by chemical modification techniques which are well known in the art. Such modifications are well described in basic texts and in more detailed monographs, as well as in a voluminous research literature. Modifications can occur anywhere in a polypeptide, including the peptide backbone, the amino acid side-chains and the amino or carboxyl termini. It will be appreciated that the same type of modification may be present in the same or varying degrees at several sites in a given polypeptide. Also, a given polypeptide may contain many types of modifications. Polypeptides may be branched, for example, as a result of ubiquitination, and they may be cyclic, with or without branching. Cyclic, branched, and branched cyclic polypeptides may result from posttranslation natural processes or may be made by synthetic methods. Modifications include acetylation, acylation, ADP-ribosylation, amidation, covalent attachment of flavin, covalent attachment of a heme moiety, covalent attachment of a nucleotide or nucleotide derivative, covalent attachment of a lipid or lipid derivative, covalent attachment of phosphotidylinositol, cross-linking, cyclization, disulfide bond formation, demethylation, formation of covalent cross-links, formation of cysteine, formation of pyroglutamate, formylation, gamma-carboxylation, glycosylation, GPI anchor formation, hydroxylation, iodination, methylation, myristoylation, oxidation, pegylation, proteolytic processing, phosphorylation, prenylation, racemization, selenoylation, sulfation, transfer-RNA mediated addition of amino acids to proteins such as arginylation, and ubiquitination. (See, for instance, PROTEINS—STRUCTURE AND MOLECULAR PROPERTIES, 2nd Ed., T. E. Creighton, W. H. Freeman and Company, New York (1993); POSTTRANSLATIONAL COVALENT MODIFICATION OF PROTEINS, B. C. Johnson, Ed., Academic Press, New York, pgs. 1-12 (1983); Seifter et al., Meth. Enzymol. 182:626-646 (1990); Rattan et al., Ann. N.Y. Acad. Sci. 663:48-62 (1992).)

[0051] “SEQ ID NO:X” refers to a polynucleotide sequence described, for example, in Tables 1A or 2, while “SEQ ID NO:Y” refers to a polypeptide sequence described in column 5 of Table 1A. SEQ ID NO:X is identified by an integer specified in column 3 of Table 1A. The polypeptide sequence SEQ ID NO:Y is a translated open reading frame (ORF) encoded by polynucleotide SEQ ID NO:X. “Clone ID NO:Z” refers to a cDNA clone described in column 1 of Table 1A.

[0052] “A polypeptide having biological activity” refers to a polypeptide exhibiting activity similar to, but not necessarily identical to, an activity of a polypeptide of the present invention, including mature forms, as measured in a particular biological assay, with or without dose dependency. In the case where dose dependency does exist, it need not be identical to that of the polypeptide, but rather substantially similar to the dose-dependence in a given activity as compared to the polypeptide of the present invention (i.e., the candidate polypeptide will exhibit greater activity or not more than about 25-fold less and, preferably, not more than about tenfold less activity, and most preferably, not more than about three-fold less activity relative to the polypeptide of the present invention).

[0053] Table 1A summarizes some of the endocrine associated polynucleotides encompassed by the invention (including contig sequences (SEQ ID NO:X) and clones (Clone ID NO:Z) and further summarizes certain characteristics of these polynucleotides and the polypeptides encoded thereby.

[0054] Polynucleotides and Polypeptides

TABLE 1A

| | | | | AA | | Tissue Distribution | | |
|---|---|---|---|---|---|---|---|---|
| | | | ORF | SEQ | | Library code: count | | OMIM |
| Clone ID | Contig | SEQ ID | (From- | ID | | (see Table IV for | Cytologic | Disease |
| NO: Z | ID: | NO: X | To) | NO: Y | Predicted Epitopes | Library Codes) | Band | Reference(s): |
| HATAA38 | 963315 | 11 | 49-225 | 205 | Arg-16 to Asn-24, | H0156: 2 | | |
| | | | | | Phe-30 to Leu-40. | | | |
| HATAC35 | 928004 | 12 | 9-311 | 206 | Ala-31 to Ser-41, | H0156: 2 | | |
| | | | | | Glu-46 to Asp-53. | | | |
| HATAE19 | 508525 | 13 | 144-263 | 207 | | H0156: 2 | | |
| HATAN18 | 504600 | 14 | 168-311 | 208 | Arg-11 to Ser-16, | H0156: 2 | | |
| | | | | | Ala-39 to Asn-48. | | | |
| HATAQ04 | 928020 | 15 | 99-365 | 209 | Ser-38 to Arg-44. | H0156: 2 | | |
| HATAY60 | 522934 | 16 | 3-134 | 210 | His-14 to Leu-20. | H0156: 2 | | |
| HATAZ55 | 889014 | 17 | 52-171 | 211 | | H0156: 3 | | |
| HATBB73 | 508537 | 18 | 142-273 | 212 | | H0156: 2 | | |
| HATBI15 | 660745 | 19 | 2-253 | 213 | Ser-8 to Leu-32. | H0156: 2 | | |
| HATBM24 | 527201 | 20 | 164-331 | 214 | Asn-22 to G1y-32. | H0156: 2 | | |
| HATBS54 | 622676 | 21 | 2-169 | 215 | His-3 to Gly-9. | H0156: 2 | | |
| HATCA71 | 530380 | 22 | 130-264 | 216 | Lys-1 to Gln-9. | H0156: 2 | | |
| HATCB55 | 530383 | 23 | 168-323 | 217 | Gln-16 to Cys-22. | H0156: 2 | | |
| HATCE75 | 523863 | 24 | 129-308 | 218 | Thr-19 to His-42. | H0156: 2 | | |
| HATCG79 | 530533 | 25 | 80-268 | 219 | Gly-1 to Pro-12. | H0156: 2 | | |
| HATCK46 | 530428 | 26 | 100-252 | 220 | Arg-25 to Gly-34. | H0156: 2 | | |
| HATCK51 | 530427 | 27 | 188-352 | 221 | Phe-15 to Gly-20. | H0156: 2 | | |
| HATCK74 | 507347 | 28 | 3-185 | 222 | Pro-30 to Pro-41. | H0156: 2 | | |
| HATCN27 | 573594 | 29 | 234-350 | 223 | Ala-19 to Gly-24. | H0156: 2 | | |
| HATCW02 | 958548 | 30 | 59-319 | 224 | | H0156: 175, L0517: 2 | | |
| | | | | | | and H0087: 1. | | |
| HATCX57 | 972402 | 31 | 1-222 | 225 | Arg-1 to Arg-13. | H0156:2 | | |
| HATCX60 | 529946 | 32 | 26-91 | 226 | | H0156: 2 | | |
| HATDD31 | 698297 | 33 | 2-301 | 227 | | H0156: 2 | | |
| HATDE50 | 461477 | 34 | 206-532 | 228 | Ser-32 to Ser-42. | H0156: 4 and L0769: 1. | | |
| HATDI85 | 573578 | 35 | 35-277 | 229 | Thr-8 to Arg-13. | H0156: 2 | | |
| HATDL29 | 848053 | 36 | 159-416 | 230 | Ser-37 to Arg-48. | H0156: 2 and L0766: 1. | | |
| HATDN54 | 573622 | 37 | 123-284 | 231 | Cys-1 to Thr-8. | H0156: 2 and L0761: 1. | | |
| HATDO64 | 573620 | 38 | 147-284 | 232 | | H0156: 2 | | |
| HATDR20 | 573535 | 39 | 103-216 | 233 | | H0156: 2 | | |
| HATDT90 | 524177 | 40 | 21-146 | 234 | | H0156: 2 | | |
| HATEH76 | 878096 | 41 | 16-483 | 235 | Ser-33 to Pro-40, | H0156: 2 and L0592: 1. | | |
| | | | | | Ala-48 to His-57, | | | |
| | | | | | Pro-72 to Gly-81. | | | |
| HEFMB58 | 665206 | 42 | 97-288 | 236 | Asp-42 to Ser-57. | S0402: 2 | | |
| HEFME17 | 662268 | 43 | 107-304 | 237 | Lys-20 to Lys-25. | S0402: 1 and H0275: 1. | | |
| HIABC73 | 509663 | 44 | 2-298 | 238 | Thr-1 to Cys-7. | H0156: 1 and H0071: 1. | | |
| HIABI65 | 753952 | 45 | 3-314 | 239 | Gln-3 to Met-8. | H0071: 2, L0769: 2, | | |
| | | | | | | L0803: 1, L0633: 1, | | |
| | | | | | | L0789: 1, L0438: 1, | | |
| | | | | | | L0439: 1 and L0599: 1. | | |
| HIATE15 | 715747 | 46 | 3-221 | 240 | Pro-19 to Gly-28. | L0803: 4, L0748: 4, | | |
| | | | | | | L0757: 3, H0275: 2, | | |
| | | | | | | L0776: 2, L0789: 2, | | |
| | | | | | | L0731: 2, L0770: 1, | | |
| | | | | | | L0794: 1, L0766: 1, | | |
| | | | | | | L0805: 1, L0655: 1, | | |
| | | | | | | L0658: 1, L0790: 1, | | |
| | | | | | | L0666: 1, L0779: 1, | | |
| | | | | | | L0777: 1, L0758: 1, | | |
| | | | | | | L0759: 1, L0596: 1 and | | |
| | | | | | | L0604: 1. | | |
| HIATG66 | 967764 | 47 | 69-272 | 241 | | H0275: 2 | | |
| HNHHD37 | 844843 | 48 | 3-239 | 242 | Ile-1 to Thr-6. | H0213: 105, H0604: | | |
| | | | | | | 99, H0424: 85, H0033: | | |
| | | | | | | 45, H0405: 9, H0401: | | |
| | | | | | | 5, H0418: 5, H0417: 4, | | |
| | | | | | | H0553: 2, H0178: 1, | | |
| | | | | | | H0416: 1, H0100: 1, | | |
| | | | | | | S0053: 1 and H0518: 1. | | |
| HPDCA64 | 509426 | 49 | 179-301 | 243 | | T0023: 2 | | |
| HPDDY59 | 887864 | 50 | 3-296 | 244 | Asn-1 to Ala-6, | T0023: 2 | | |
| | | | | | Lys-25 to Thr-33, | | | |
| | | | | | Pro-49 to Asn-56. | | | |
| HPDEG54 | 522679 | 51 | 136-234 | 245 | | T0023: 2 | | |
| HPDEK41 | 508547 | 52 | 197-337 | 246 | Gln-9 to Arg-21. | T0023: 2 | | |
| HPTAC80 | 671552 | 53 | 1-270 | 247 | Glu-69 to Phe-77, | H0156: 1 and H0033: 1. | | |
| | | | | | Glu-85 to Ser-90. | | | |
| HPTBA43 | 573878 | 54 | 244-405 | 248 | Arg-4 to Arg-12. | H0033: 2 | | |
| HPTBB78 | 967902 | 55 | 36-215 | 249 | Lys-17 to Tyr-28. | H0033: 1, H0424: 1 | | |
| | | | | | | and H0213: 1. | | |
| HPTDB64 | 526236 | 56 | 80-244 | 250 | Glu-1 to Val-6, | L0659: 2, H0033: 1, | | |
| | | | | | Arg-11 to Gly-19. | H0424: 1, H0213: 1 | | |
| | | | | | | and L0530: 1. | | |
| HPTGB50 | 867340 | 57 | 3-230 | 251 | Pro-5 to Ser-10. | H0424: 2 and H0405: 1. | | |
| HPTRB72 | 973817 | 58 | 2-409 | 252 | Arg-21 to Ala-29, | AR061: 440, AR089: | | |
| | | | | | Gln-91 to Pro-99. | 168 | | |
| | | | | | | H0424: 3, H0418: 1, | | |
| | | | | | | L0767: 1, L0794: 1 and | | |
| | | | | | | L0758: 1. | | |
| HPTRD50 | 710425 | 59 | 75-227 | 253 | | H0424: 2 | | |
| HPTRE22 | 589333 | 60 | 1-345 | 254 | Leu-7 to Lys-15, | H0424: 2 | | |
| | | | | | Phe-24 to His-31, | | | |
| | | | | | Val-77 to Glu-88. | | | |
| HPTRE26 | 576790 | 61 | 64-342 | 255 | | H0424: 1 and H0418: 1. | | |
| HPTRG91 | 773605 | 62 | 2-256 | 256 | Asn-7 to Ser-12, | H0424: 2 and L0743: 2. | | |
| | | | | | Arg-20 to Ala-26, | | | |
| | | | | | Arg-72 to Gly-82. | | | |
| HPTRJ48 | 575987 | 63 | 16-276 | 257 | Ser-7 to Leu-15. | H0424: 2 | | |
| HPTRJ77 | 575981 | 64 | 105-25 | 258 | | H0424: 2 | | |
| HPTRL28 | 575991 | 65 | 3-140 | 259 | | H0424: 2 | | |
| HPTRL32 | 964772 | 66 | 209-349 | 260 | | H0424: 8, H0405: 1 | | |
| | | | | | | and H0418: 1. | | |
| HPTRL46 | 575992 | 67 | 107-178 | 261 | | H0424: 2 | 12q12-q14 | 123829, |
| | | | | | | | | 147570, |
| | | | | | | | | 181430, |
| | | | | | | | | 252940, |
| | | | | | | | | 264700, |
| | | | | | | | | 600194, |
| | | | | | | | | 600231, |
| | | | | | | | | 600808, |
| | | | | | | | | 601284, |
| | | | | | | | | 601769, |
| | | | | | | | | 601769, |
| | | | | | | | | 602116 |
| HPTRN57 | 916998 | 68 | 266-610 | 262 | | H0424: 13, H0213: 2, | | |
| | | | | | | H0418: 2 and S0146: 1. | | |
| HPTRO02 | 920338 | 69 | 1-324 | 263 | Ser-10 to Gly-19, | H0424: 2 and H0418: 2. | | |
| | | | | | Glu-74 to Cys-80. | | | |
| HPTRO92 | 960736 | 70 | 1-309 | 264 | | H0424: 1 and H0213: 1. | | |
| HPTRS54 | 953674 | 71 | 234-413 | 265 | Glu-1 to Ser-6. | H0424: 2 and H0418: 1. | | |
| HPTRS61 | 841701 | 72 | 1-369 | 266 | Arg-23 to Glu-34, | H0424: 3 | | |
| | | | | | Phe-73 to Trp-79. | | | |
| HPTRS63 | 675992 | 73 | 69-323 | 267 | Gln-1 to Glu-8, | H0424: 2 | | |
| | | | | | His-39 to Arg-47. | | | |
| HPTRV21 | 953489 | 74 | 121-411 | 268 | Leu-49 to Ser-54. | H0424: 4, H0638: 1, | | |
| | | | | | | L0766: 1 and L0751: 1. | | |
| HPTRW89 | 575995 | 75 | 64-216 | 269 | Lys-9 to Arg-16, | H0424: 2 | | |
| | | | | | His-27 to Lys-36. | | | |
| HPTRX19 | 975341 | 76 | 1-201 | 270 | His-13 to Gly-23. | H0424: 4 and H0213: 1. | | |
| HPTTA18 | 954361 | 77 | 201-356 | 271 | | H0213: 2 | | |
| HPTTB59 | 522659 | 78 | 3-164 | 272 | | H0213: 2 | | |
| HPTTE22 | 968632 | 79 | 15-344 | 273 | | L0769: 3, H0213: 2, | | |
| | | | | | | L0809: 2 and L0774: 1. | | |
| HPTTK61 | 951024 | 80 | 168-326 | 274 | | H0424: 1 and H0213: 1. | | |
| HPTTL50 | 693555 | 81 | 1-111 | 275 | | H0213: 2 | | |
| HPTTL53 | 526246 | 82 | 3-287 | 276 | | H0033: 1 and H0213: 1. | | |
| HPTTR23 | 519899 | 83 | 77-376 | 277 | | H0424: 2 and H0213: 2. | | |
| HPTTU76 | 771294 | 84 | 2-160 | 278 | Ile-1 to Arg-15. | H0424: 1 and H0213: 1. | 2p16-p21 | 120435, |
| | | | | | | | | 120435, |
| | | | | | | | | 126600, |
| | | | | | | | | 126600, |
| | | | | | | | | 135300, |
| | | | | | | | | 136435, |
| | | | | | | | | 152790, |
| | | | | | | | | 152790, |
| | | | | | | | | 157170, |
| | | | | | | | | 160980, |
| | | | | | | | | 182601, |
| | | | | | | | | 600678, |
| | | | | | | | | 601771 |
| HPTVA78 | 575989 | 85 | 2-409 | 279 | Ala-1 to Asn-7, | H0424: 3 | | |
| | | | | | Leu-62 to Ser-75, | | | |
| | | | | | Gly-84 to Glu-93. | | | |
| HPTVC63 | 576794 | 86 | 1-267 | 280 | Cys-28 to Trp-35, | H0424: 1 and H0418: 1. | | |
| | | | | | Gly-51 to Ala-56, | | | |
| | | | | | Pro-58 to His-68. | | | |
| HPTVD46 | 575986 | 87 | 3-290 | 281 | Arg-1 to Arg-9, | H0424: 2 | | |
| | | | | | Ala-14 to Asp-20, | | | |
| | | | | | Gly-25 to Thr-41, | | | |
| | | | | | Arg-46 to Gln-53, | | | |
| | | | | | Arg-57 to Glu-67, | | | |
| | | | | | Glu-72 to Arg-77. | | | |
| HPTVF33 | 929663 | 88 | 1-363 | 282 | Ala-19 to Glu-24. | H0424: 3 | | |
| HPTVF92 | 800383 | 89 | 49-375 | 283 | Glu-26 to Pro-42, | H0424: 4 and H0213: 1. | | |
| | | | | | Gln-74 to Cys-98, | | | |
| | | | | | Ala-100 to Lys-108. | | | |
| HPTVI60 | 575971 | 90 | 16-102 | 284 | Ala-1 to Ala-23. | H0424: 2 | | |
| HPTVJ51 | 724992 | 91 | 1-231 | 285 | Thr-2 to Ser-7, | H0033: 1 and H0424: 1. | | |
| | | | | | Tyr-18 to Trp-24. | | | |
| HPTVK12 | 970825 | 92 | 1-243 | 286 | Pro-22 to Gln-29, | H0424: 2 | | |
| | | | | | His-42 to Thr-47. | | | |
| HPTVP65 | 575973 | 93 | 102-224 | 287 | Cys-31 to Tyr-41. | H0424: 3 | | |
| HPTVQ26 | 867345 | 94 | 116-553 | 288 | Gln-4 to Gly-17, | H0424: 2 and L0769: 2. | | |
| | | | | | Cys-33 to Pro-47, | | | |
| | | | | | Ser-63 to Leu-80, | | | |
| | | | | | Ile-95 to Trp-100, | | | |
| | | | | | Pro-106 to Thr-113. | | | |
| HPTVV37 | 576733 | 95 | 362-63 | 289 | | H0424: 3 | | |
| HPTWA13 | 975009 | 96 | 387-611 | 290 | Ile-6 toTrp-13, | H0424: 4 and H0213: 1. | | |
| | | | | | Leu-26 to Leu-35. | | | |
| HPTWF25 | 577120 | 97 | 196-414 | 291 | Pro-7 to Thr-13. | H0424: 2 and H0033: 1. | | |
| HPTWG27 | 506242 | 98 | 103-360 | 292 | Arg-55 to Asp-63. | H0424: 2, L0769: 2 | | |
| | | | | | | and H0417: 1. | | |
| HPTXE41 | 711991 | 99 | 47-373 | 293 | Pro-24 to Leu-29, | H0604: 1 and H0213: 1. | | |
| | | | | | Leu-33 to Asp-41, | | | |
| | | | | | Pro-52 to Pro-58. | | | |
| HPTXN72 | 761488 | 100 | 1-204 | 294 | Pro-30 to Arg-42. | H0604: 1, H0424: 1 | | |
| | | | | | | and L0757: 1. | | |
| HPTZA59 | 871383 | 101 | 70-345 | 295 | Glu-1 to Lys-7. | H0424: 1 and H0418: 1. | | |
| HPTZB44 | 573273 | 102 | 57-167 | 296 | | H0213: 1 and H0418: 1. | | |
| HPYAA23 | 592397 | 103 | 124-267 | 297 | | H0034: 2 | | |
| HTNBR88 | 519756 | 104 | 7-174 | 298 | | AR051: 32, AR054: | | |
| | | | | | | 28, AR050: 25 | | |
| | | | | | | T0067: 3 | | |
| HWESE66 | 835990 | 105 | 242-105 | 299 | | L0439: 1 and S0462: 1. | | |
| HWESA01 | 915173 | 106 | 275-433 | 300 | Ser-1 to Pro-11. | L0532: 1, L0747: 1, | | |
| | | | | | | L0731: 1 and S0462: 1. | | |
| HTNBY41 | 747239 | 107 | 21-569 | 301 | Ser-1 to Gly-6, | L0747: 6, L0756: 2, | | |
| | | | | | Gly-10 to Gly-24, | T0067: 1, L0766: 1 and | | |
| | | | | | Gly-27 to Gly-38, | L0743: 1. | | |
| | | | | | Leu-50 to Thr-56, | | | |
| | | | | | Ser-78 to Tyr-85, | | | |
| | | | | | Gly-90 to Ser-102, | | | |
| | | | | | Leu-144 to Tyr-149. | | | |
| HTNBX31 | 698438 | 108 | 427-191 | 302 | Pro-21 to Pro-32, | L0439: 2, T0067: 1, | 12q24.2- | 100650, |
| | | | | | Val-68 to Asn-74. | L0803: 1 and L0791: 1. | q24.3 | 100650, |
| | | | | | | | | 142410, |
| | | | | | | | | 142410, |
| | | | | | | | | 142410, |
| | | | | | | | | 160781, |
| | | | | | | | | 181405 |
| HTNBT32 | 702974 | 109 | 1-234 | 303 | Arg-1 to Pro-6, | L0752: 4, L0766: 3, | | |
| | | | | | Ser-8 to Trp-27. | L0747: 3, L0803: 2, | | |
| | | | | | | L0438: 2, L0777: 2, | | |
| | | | | | | L0759: 2, T0067: 1, | | |
| | | | | | | L0770: 1, L0662: 1, | | |
| | | | | | | L0768: 1, L0775: 1, | | |
| | | | | | | L0805: 1, L0776: 1, | | |
| | | | | | | L0439: 1, L0756: 1, | | |
| | | | | | | L0755: 1 and L0731: 1. | | |
| HTNBO63 | 968238 | 110 | 90-374 | 304 | Pro-1 to Trp-7, | T0067: 1 and L0758: 1. | | |
| | | | | | Thr-9 to Pro-18, | | | |
| | | | | | Pro-44 to Thr-57, | | | |
| | | | | | Ile-76 to Asn-85. | | | |
| HTNBO21 | 870052 | 111 | 565-341 | 305 | | T0067: 1 | | |
| HTNBN03 | 960877 | 112 | 342-596 | 306 | Arg-14 to Thr-27, | T0067: 1 and L0662: 1. | | |
| | | | | | Arg-51 to Leu-60, | | | |
| | | | | | Gly-64 to His-72. | | | |
| HTNBE16 | 667653 | 113 | 264-572 | 307 | Glu-28 to Phe-37. | AR061: 1, AR089: 1 | | |
| | | | | | | L0756: 2 and T0067: 1. | | |
| HTNAU71 | 764772 | 114 | 234-386 | 308 | Leu-5 to Arg-11, | T0067: 1 and L0753: 1. | | |
| | | | | | Glu-17 to Gly-25. | | | |
| HTNAP60 | 742363 | 115 | 59-247 | 309 | Leu-7 to Thr-23. | L0754: 2 and T0067: 1. | | |
| HTNAO91 | 790479 | 116 | 163-405 | 310 | | T0067: 1 and L0748: 1. | | |
| HTNAO78 | 773906 | 117 | 95-256 | 311 | | T0067: 1, L0749: 1 | | |
| | | | | | | and L0757: 1. | | |
| HTNAO10 | 582652 | 118 | 451-98 | 312 | | T0067: 1 | | |
| | 964189 | 203 | 88-258 | 397 | Phe-48 to Asn-53. | | | |
| HTNAM62 | 742407 | 119 | 63-281 | 313 | Arg-42 to Lys-50. | T0067: 1 and L0748: 1. | | |
| HTNAM36 | 708319 | 120 | 3-182 | 314 | | T0067: 1, L0748: 1 | | |
| | | | | | | and L0599: 1. | | |
| HTNAM05 | 932848 | 121 | 174-374 | 315 | Gly-33 to Ser-46. | T0067: 1, L0768: 1 | | |
| | | | | | | and L0794: 1. | | |
| HTNAC78 | 772786 | 122 | 72-245 | 316 | | L0439: 3, T0067: 1 | | |
| | | | | | | and L0592: 1. | | |
| HPYAA82 | 781551 | 123 | 162-4 | 317 | Val-4 to Asn-9, | H0034: 1 and L0740: 1. | | |
| | | | | | Pro-20 to Tyr-28. | | | |
| HPYAA77 | 591652 | 124 | 284-54 | 318 | | AR051: 24, AR050: | | |
| | | | | | | 21, AR054: 8 | | |
| | | | | | | H0034: 1 | | |
| HPYAA44 | 503594 | 125 | 172-5 | 319 | | H0034: 1 | | |
| HPTTK64 | 893859 | 126 | 1-516 | 320 | | AR061: 7, AR089: 5 | | |
| | | | | | | L0758: 2, H0213: 1 | | |
| | | | | | | and L0779: 1. | | |
| HPTSJ47 | 720643 | 127 | 125-682 | 321 | Gln-4 to Ser-11, | L0759: 2 and H0213: 1. | | |
| | | | | | Val-62 to Pro-74, | | | |
| | | | | | Pro-76 to Glu-91. | | | |
| HPTRX50 | 577997 | 128 | 2-322 | 322 | Thr-7 to His-14. | H0424: 1 and L0745: 1. | | |
| HPTRL10 | 964781 | 129 | 94-393 | 323 | Pro-4 to Arg-10. | H0424: 1, L0805: 1, | | |
| | | | | | | L0779: 1 and L0758: 1. | | |
| HPTRG17 | 867379 | 130 | 27-218 | 324 | Pro-52 to Ala-60. | H0424: 1 and L0542: 1. | | |
| HPTRA75 | 586339 | 131 | 2-244 | 325 | Ala-2 to Gln-10, | AR054: 6, AR051: 2, | | |
| | | | | | Ser-29 to Asn-35, | AR050: 1 | | |
| | | | | | Pro-68 to Ile-75. | H0424: 1 and H0673: 1. | | |
| HPDEF87 | 506557 | 132 | 2-310 | 326 | Arg-18 to His-33. | T0023: 1 | | |
| HPDDZ29 | 835822 | 133 | 174-470 | 327 | Glu-29 to Ala-37, | L0740: 2, T0023: 1 | | |
| | | | | | Ser-51 to Ser-59, | and L0748: 1. | | |
| | | | | | Leu-67 to Lys-88. | | | |
| HPDDW82 | 780234 | 134 | 162-365 | 328 | | L0748: 2 and T0023: 1. | | |
| HPDDM95 | 796713 | 135 | 86-202 | 329 | | T0023: 1 and L0603: 1. | | |
| HPDDM87 | 466374 | 136 | 2-286 | 330 | Tyr-68 to Ile-74, | T0023: 1 | | |
| | | | | | Gly-89 to Lys-95. | | | |
| | 470508 | 204 | 277-26 | 398 | His-3 to Glu-26, | | | |
| | | | | | Leu-52 to Leu-58, | | | |
| | | | | | Gly-62 to Glu-67, | | | |
| | | | | | Trp-77 to Ser-83. | | | |
| HPDDL52 | 863088 | 137 | 34-474 | 331 | Gln-38 to Phe-49. | AR050: 156, AR051: | | |
| | | | | | | 150, AR054: 131, | | |
| | | | | | | AR089: 12, AR061: 9 | | |
| | | | | | | S0426: 3, S0360: 2, | | |
| | | | | | | H0087: 2, S0142: 2, | | |
| | | | | | | H0538: 2, H0672: 2, | | |
| | | | | | | L0749: 2, L0594: 2, | | |
| | | | | | | H0650: 1, S0116: 1, | | |
| | | | | | | H0255: 1, L0717: 1, | | |
| | | | | | | H0599: 1, H0318: 1, | | |
| | | | | | | H0581: 1, H0597: 1, | | |
| | | | | | | H0050: 1, T0023: 1, | | |
| | | | | | | H0090: 1, H0591: 1, | | |
| | | | | | | H0040: 1, L0769: 1, | | |
| | | | | | | L0639: 1, L0771: 1, | | |
| | | | | | | L0662: 1, L0774: 1, | | |
| | | | | | | L0523: 1, L0659: 1, | | |
| | | | | | | L0787: 1, L0664: 1, | | |
| | | | | | | L0665: 1, H0689: 1, | | |
| | | | | | | S0378: 1, H0710: 1, | | |
| | | | | | | H0521: 1, H0522: 1, | | |
| | | | | | | L0743: 1, L0748: 1, | | |
| | | | | | | L0750: 1, L0758: 1, | | |
| | | | | | | S0031: 1, L0592: 1, | | |
| | | | | | | L0603: 1, S0458: 1 and | | |
| | | | | | | H0506: 1. | | |
| HPDDL28 | 685070 | 138 | 25-201 | 332 | | T0023: 1 and L0748: 1. | | |
| HPDDK36 | 708171 | 139 | 301-531 | 333 | Lys-38 to Asp-44. | L0439: 4, L0599: 2 | | |
| | | | | | | and T0023: 1. | | |
| HPDDI10 | 968674 | 140 | 2-472 | 334 | Pro-5 to Gly-12, | T0023: 1 and L0609: 1. | | |
| | | | | | His-24 to Asn-34. | | | |
| HPDCA34 | 706837 | 141 | 317-442 | 335 | | T0023: 1, L0659: 1 | | |
| | | | | | | and L0439: 1. | | |
| HIATK32 | 699711 | 142 | 297-422 | 336 | Gly-2 to Gln-7. | H0275: 1 and L0754: 1. | | |
| HIATG92 | 584679 | 143 | 2-202 | 337 | | H0275: 1 | | |
| HIATG60 | 739690 | 144 | 3-224 | 338 | Gln-49 to Thr-58. | H0275: 1 and L0749: 1. | | |
| HIATG59 | 739589 | 145 | 154-303 | 339 | Ser-36 to His-42. | H0275: 1 and L0748: 1. | | |
| HIATE16 | 430767 | 146 | 18-164 | 340 | Glu-18 to Thr-23. | H0275: 1 and L0777: 1. | | |
| HIASC20 | 502760 | 147 | 3-362 | 341 | Lys-26 to Trp-35; | H0107: 1 | | |
| | | | | | Pro-51 to Arg-64. | | | |
| HIASC18 | 502762 | 148 | 69-215 | 342 | Ala-1 to Ala-7, | H0107: 1 | | |
| | | | | | Lys-21 to Arg-26. | | | |
| HIAB173 | 764760 | 149 | 81-350 | 343 | Asn-46 to Ser-57. | H0071: 1 and L0605: 1. | | |
| HIABG69 | 793730 | 150 | 1-837 | 344 | Gln-79 to Phe-86, | H0071: 1, L0766: 1 | | |
| | | | | | Tyr-105 to Cys-113, | and L0754: 1. | | |
| | | | | | Glu-122 to Lys-128, | | | |
| | | | | | Pro-178 to Pro-186. | | | |
| HIABF58 | 857613 | 151 | 13-246 | 345 | | L0471: 1 and H0071: 1. | | |
| HIABA07 | 894057 | 152 | 164-18 | 346 | Gln-1 to Gly-18, | H0071: 1 | | |
| | | | | | Pro-43 to Ala-49. | | | |
| HIAAA75 | 504344 | 153 | 136-8 | 347 | Leu-15 to Thr-20, | H0021: 1 | | |
| | | | | | Lys-27 to Val-43. | | | |
| HIAAA49 | 723338 | 154 | 324-464 | 348 | Asn-13 to Pro-18, | H0021: 1 | | |
| | | | | | Arg-39 to Pro-46. | | | |
| HEFMC68 | 752699 | 155 | 216-533 | 349 | Pro-3 to Phe-8, | L0754: 3 and S0402: 1. | | |
| | | | | | Tyr-22 to Ser-32, | | | |
| | | | | | Gly-61 to Asp-68. | | | |
| HATEI83 | 781290 | 156 | 20-187 | 350 | Pro-1 to His-7. | L0748: 2 and H0156: 1. | | |
| HATEG67 | 864454 | 157 | 254-487 | 351 | | H0156: 1 and L0591: 1. | | |
| HATEE95 | 908958 | 158 | 3-314 | 352 | Gln-6 to Leu-11, | AR061: 4, AR089: 2 | Xp11.21 | 300047, |
| | | | | | Leu-13 to Gln-20, | L0600: 4, H0156: 1, | | 301300, |
| | | | | | Val-29 to His-35, | L0655: 1, L0352: 1, | | 301830, |
| | | | | | Ile-42 to Ser-57, | L0439: 1, L0604: 1 | | 305400, |
| | | | | | Ala-61 to Thr-67, | and: 1. | | 308300, |
| | | | | | Thr-82 to His-93, | | | 309470, |
| | | | | | His-97 to Met-104. | | | 309500, |
| | | | | | | | | 309610, |
| | | | | | | | | 311050 |
| HATEC80 | 461733 | 159 | 58-288 | 353 | | H0156: 1, L0439: 1 | | |
| | | | | | | and L0747: 1. | | |
| HATEC07 | 960782 | 160 | 31-600 | 354 | Gly-2 to Ala-8, | H0156: 1 and L0753: 1. | | |
| | | | | | Ser-12 to Ala-17, | | | |
| | | | | | Ser-72 to Gly-81, | | | |
| | | | | | Glu-109 to Gly-115, | | | |
| | | | | | Lys-135 to Lys-141, | | | |
| | | | | | Arg-167 to Gly-172, | | | |
| | | | | | Asn-185 to Asn-190. | | | |
| HATDY17 | 664314 | 161 | 323-550 | 355 | Asn-41 to Asn-46. | L0518: 3, H0156: 1, | | |
| | | | | | | L0789: 1, L0741: 1 and | | |
| | | | | | | L0439: 1. | | |
| HATDY02 | 920529 | 162 | 161-292 | 356 | Ser-34 to Asn-41. | H0156: 1 and L0766: 1. | | |
| HATDX74 | 765761 | 163 | 292-486 | 357 | Ser-1 to Gly-7. | H0156: 1 and L0748: 1. | | |
| HATDX03 | 848537 | 164 | 2-370 | 358 | Pro-13 to Lys-18. | H0156: 1 and L0763: 1. | | |
| HATDU21 | 671175 | 165 | 260-442 | 359 | | H0156: 1 and L0751: 1. | | |
| HATDQ08 | 959815 | 166 | 320-442 | 360 | Pro-10 to Gln-15, | H0156: 1, L0766: 1 | | |
| | | | | | Lys-24 to Leu-31, | and L0803: 1. | | |
| | | | | | His-33 to His-39. | | | |
| HATDO55 | 732301 | 167 | 415-678 | 361 | Asn-26 to Asp-32. | H0156: 1 and L0756: 1. | | |
| HATDM11 | 967365 | 168 | 146-277 | 362 | | H0156: 1 and L0375: 1. | | |
| HATDJ67 | 575729 | 169 | 132-236 | 363 | Phe-1 to Thr-6. | H0156: 1 | | |
| HATDJ51 | 725807 | 170 | 212-415 | 364 | Leu-13 to Asp-22. | H0156: 1 and L0754: 1. | | |
| HATDG45 | 722088 | 171 | 318-503 | 365 | | H0156: 1 and L0754: 1. | | |
| HATDE07 | 952994 | 172 | 121-321 | 366 | Gly-53 to Asn-66. | H0156: 1 | | |
| HATCV79 | 573563 | 173 | 50-334 | 367 | | L0748: 2 and H0156: 1. | | |
| HATCV67 | 573565 | 174 | 11-208 | 368 | Lys-41 to Gly-46. | H0156: 1 | | |
| HATCV56 | 573558 | 175 | 1-330 | 369 | Ser-13 to Glu-28, | H0156: 1 | | |
| | | | | | Pro-52 to Gly-59. | | | |
| HATCV20 | 739258 | 176 | 3-314 | 370 | Asp-14 to Leu-23. | L0749: 3, L0717: 2, | | |
| | | | | | | H0156: 1, L0750: 1, | | |
| | | | | | | L0755: 1 and L0759: 1. | | |
| HATCS68 | 573572 | 177 | 3-140 | 371 | | H0156: 1 | | |
| HATCS57 | 573530 | 178 | 63-218 | 372 | | H0156: 1 | | |
| HATCR61 | 576886 | 179 | 341-535 | 373 | Ser-60 to Ala-65. | H0156: 1, L0754: 1 | | |
| | | | | | | and L0745: 1. | | |
| HATCR10 | 848579 | 180 | 295-432 | 374 | Asn-1 to Trp-9, | H0156: 1, L0740: 1 | | |
| | | | | | Lys-17 to Pro-28. | and L0589: 1. | | |
| HATCQ89 | 786007 | 181 | 136-321 | 375 | Ser-1 to Gly-10, | L0439: 6 and H0156: | | |
| | | | | | Glu-22 to Val-27, | 1. | | |
| | | | | | Asn-51 to Thr-56. | | | |
| HATCP45 | 722080 | 182 | 66-266 | 376 | Glu-48 to Lys-67. | H0156: 1, L0439: 1, | | |
| | | | | | | L0745: 1 and L0756: 1. | | |
| HATCO92 | 790644 | 183 | 129-302 | 377 | | L0439: 2 and H0156: 1. | | |
| HATCM33 | 953785 | 184 | 485-859 | 378 | Pro-94 to Ser-101, | L0766: 4, L0779: 3, | | |
| | | | | | Thr-117 to Thr-125. | L0776: 2, H0543: 2, | | |
| | | | | | | S0001: 1, H0638: 1, | | |
| | | | | | | S0222: 1, H0013: 1, | | |
| | | | | | | H0156: 1, H0050: 1, | | |
| | | | | | | H0375: 1, H0591: 1, | | |
| | | | | | | L0662: 1, L0803: 1, | | |
| | | | | | | L0805: 1, H0547: 1, | | |
| | | | | | | H0555: 1, S0392: 1, | | |
| | | | | | | L0748: 1, L0749: 1, | | |
| | | | | | | H0595: 1, H0653: 1 | | |
| | | | | | | and H0542: 1. | | |
| HATCK18 | 828685 | 185 | 43-339 | 379 | Ala-1 to Ser-8, | H0156: 1 and L0666: 1. | | |
| | | | | | Ala-34 to His-39, | | | |
| | | | | | Leu-46 to Gly-67. | | | |
| HATCI79 | 781788 | 186 | 60-299 | 380 | Gly-41 to Pro-53, | H0156: 1 and L0754: 1. | | |
| | | | | | Thr-61 to Thr-67. | | | |
| HATCG82 | 529945 | 187 | 2-304 | 381 | Arg-16 to Lys-22. | H0156: 1 and L0748: 1. | | |
| HATCA28 | 848588 | 188 | 172-324 | 382 | Gly-20 to Lys-27, | H0156: 1 and L0766: 1. | | |
| | | | | | Gly-45 to Asn-51. | | | |
| HATBS55 | 864521 | 189 | 25-339 | 383 | | H0156: 1 and L0748: 1. | | |
| HATBS24 | 678242 | 190 | 2-118 | 384 | His-3 to Ser-13. | H0156: 1 and L0748: 1. | | |
| HATBO95 | 796708 | 191 | 89-283 | 385 | Val-1 to Lys-12. | L0748: 2 and H0156: 1. | | |
| HATBM50 | 724746 | 192 | 78-200 | 386 | Asn-32 to Lys-37. | S0280: 1, H0156: 1, | 12q24.1 | 124200, |
| | | | | | | H0052: 1, L0471: 1, | | 147440, |
| | | | | | | H0135: 1, T0004: 1 and | | 160781, |
| | | | | | | L0748: 1. | | 181405, |
| | | | | | | | | 261600, |
| | | | | | | | | 261600, |
| | | | | | | | | 601406, |
| | | | | | | | | 601620, |
| | | | | | | | | 601621 |
| HATBK63 | 864526 | 193 | 279-536 | 387 | | H0156: 1 and L0769: 1. | | |
| HATBK55 | 929962 | 194 | 565-371 | 388 | | | | |
| HATBG59 | 504646 | 195 | 479-619 | 389 | | H0156: 1, L0745: 1 | | |
| | | | | | | and L0746: 1. | | |
| HATBD89 | 785931 | 196 | 1-534 | 390 | | H0156: 1, L0747: 1 | | |
| | | | | | | and L0750: 1. | | |
| HATBB46 | 504599 | 197 | 220-387 | 391 | | L0605: 2, H0156: 1 | | |
| | | | | | | and L0805: 1. | | |
| HATAN13 | 667768 | 198 | 135-311 | 392 | | H0156: 1 and L0754: 1. | | |
| HATAF70 | 888959 | 199 | 3-263 | 393 | Pro-17 to Trp-22, | AR054: 6, AR051: 2, | | |
| | | | | | Gly-32 to Leu-37, | AR050: 2 | | |
| | | | | | Ala-43 to Glu-49, | H0156: 1 | | |
| | | | | | Phe-67 to Asp-73, | | | |
| | | | | | Pro-81 to Pro-87. | | | |
| HATAE60 | 928455 | 200 | 56-517 | 394 | | AR089: 17, AR061: 14 | | |
| | | | | | | H0156: 1 and L0439: 1. | | |
| HATAC82 | 958793 | 201 | 3-170 | 395 | | H0156: 1 and L0776: 1. | | |
| HATAA80 | 781648 | 202 | 57-215 | 396 | Asn-1 to Asn-9, | L0748: 3 and H0156: 1. | | |
| | | | | | Arg-20 to Met-26. | | | |

[0055] The first column in Table 1A provides a unique “Clone ID NO:Z” for a cDNA clone related to each contig sequence disclosed in Table 1A. This clone ID references the cDNA clone which contains at least the 5′ most sequence of the assembled contig, and at least a portion of SEQ ID NO:X was determined by directly sequencing the referenced clone. The reference clone may have more sequence than described in the sequence listing or the clone may have less. In the vast majority of cases, however, the clone is believed to encode a full-length polypeptide. In the case where a clone is not full-length, a full-length cDNA can be obtained by methods known in the art and/or as described elsewhere herein.

[0056] The second column in Table 1A provides a unique “Contig ID” identification for each contig sequence. The third column provides the “SEQ ID NO:X” identifier for each of the endocrine associated contig polynucleotide sequences disclosed in Table 1A. The fourth column, “ORF (From-To)”, provides the location (i.e., nucleotide position numbers) within the polynucleotide sequence “SEQ ID NO:X” that delineate the preferred open reading frame (ORE) shown in the sequence listing and referenced in Table 1A, column 5, as SEQ ID NO:Y. Where the nucleotide position number “To” is lower than the nucleotide position number “From,” the preferred ORF is the reverse complement of the referenced polynucleotide sequence.

[0057] The fifth column in Table 1A provides the corresponding SEQ ID NO:Y for the polypeptide sequence encoded by the preferred ORF delineated in column 4. In one embodiment, the invention provides an amino acid sequence comprising, or alternatively consisting of, a polypeptide encoded by the portion of SEQ ID NO:X delineated by “ORF (From-To)”. Also provided are polynucleotides encoding such amino acid sequences and the complementary strand thereto.

[0058] Column 6 in Table 1A lists residues comprising epitopes contained in the polypeptides encoded by the preferred ORF (SEQ ID NO:Y), as predicted using the algorithm of Jameson and Wolf, (1988) Comp. Appl. Biosci. 4:181-186. The Jameson-Wolf antigenic analysis was performed using the computer program PROTEAN (Version 3.11 for the Power MacIntosh, DNASTAR, Inc., 1228 South Park Street Madison, Wis.). In specific embodiments, polypeptides of the invention comprise, or alternatively consist of, at least one, two, three, four, five or more of the predicted epitopes as described in Table 1A. It will be appreciated that depending on the analytical criteria used to predict antigenic determinants, the exact address of the determinant may vary slightly.

[0059] Column 7 in Table 1A provides an expression profile and library code: count for each of the contig sequences (SEQ ID NO:X) disclosed in Table 1A, which can routinely be combined with the information provided in Table 4 and used to determine the normal or diseased tissues, cells and/or cell line libraries which predominantly express the polynucleotides of the invention. The first number in column 7 (preceding the colon), represents the tissue/cell source identifier code corresponding to the code and description provided in Table 4. For those identifier codes in which the first two letters are not “AR”, the second number in column 7 (following the colon) represents the number of times a sequence corresponding to the reference polynucleotide sequence was identified in the tissue/cell source. Those tissue/cell source identifier codes in which the first two letters are “AR” designate information generated using DNA array technology. Utilizing this technology, cDNAs were amplified by PCR and then transferred, in duplicate, onto the array. Gene expression was assayed through hybridization of first strand cDNA probes to the DNA array. cDNA probes were generated from total RNA extracted from a variety of different tissues and cell lines. Probe synthesis was performed in the presence of ³³P dCTP, using oligo(dT) to prime reverse transcription. After hybridization, high stringency washing conditions were employed to remove non-specific hybrids from the array. The remaining signal, emanating from each gene target, was measured using a Phosphorimager. Gene expression was reported as Phosphor Stimulating Luminescence (PSL) which reflects the level of phosphor signal generated from the probe hybridized to each of the gene targets represented on the array. A local background signal subtraction was performed before the total signal generated from each array was used to normalize gene expression between the different hybridizations. The value presented after “[array code]:” represents the mean of the duplicate values, following background subtraction and probe normalization. One of skill in the art could routinely use this information to identify normal and/or diseased tissue(s) which show a predominant expression pattern of the corresponding polynucleotide of the invention or to identify polynucleotides which show predominant and/or specific tissue and/or cell expression. The sequences disclosed herein have been determined to be predominantly expressed in endocrine tissues, including normal and diseased endocrine tissues (See Table 1A, column 7 and Table 4).

[0060] Column 8 in Table 1A provides a chromosomal map location for certain polynucleotides of the invention. Chromosomal location was determined by finding exact matches to EST and cDNA sequences contained in the NCBI (National Center for Biotechnology Information) UniGene database. Each sequence in the UniGene database is assigned to a “cluster”; all of the ESTs, cDNAs, and STSs in a cluster are believed to be derived from a single gene. Chromosomal mapping data is often available for one or more sequence(s), in a UniGene cluster; this data (if consistent) is then applied to the cluster as a whole. Thus, it is possible to infer the chromosomal location of a new polynucleotide sequence by determining its identity with a mapped UniGene cluster.

[0061] A modified version of the computer program BLASTN (Altshul et al., J. Mol. Biol. 215:403-410 (1990), and Gish et al., Nat. Genet. 3:266-272 (1993)) was used to search the UniGene database for EST or cDNA sequences that contain exact or near-exact matches to a polynucleotide sequence of the invention (the ‘Query’). A sequence from the UniGene database (the ‘Subject’) was said to be an exact match if it contained a segment of 50 nucleotides in length such that 48 of those nucleotides were in the same order as found in the Query sequence. If all of the matches that met this criteria were in the same UniGene cluster, and mapping data was available for this cluster, it is indicated in Table 1A under the heading “Cytologic Band”. Where a cluster had been further localized to a distinct cytologic band, that band is disclosed; where no banding information was available, but the gene had been localized to a single chromosome, the chromosome is disclosed.

[0062] Once a presumptive chromosomal location was determined for a polynucleotide of the invention, an associated disease locus was identified by comparison with a database of diseases which have been experimentally associated with genetic loci. The database used was the Morbid Map, derived from OMIM™ (supra). If the putative chromosomal location of a polynucleotide of the invention (Query sequence) was associated with a disease in the Morbid Map database, an OMIM reference identification number was noted in column 9, Table 1A, labeled “OMIM Disease Reference(s)”. Table 5 is a key to the OMIM reference identification numbers (column 1), and provides a description of the associated disease in Column 2.

TABLE 1B

| Clone ID | SEQ ID | CONTIG | BAC | SEQ ID | EXON |
|---|---|---|---|---|---|
| NO: Z | NO: X | ID: | ID: A | NO: B | From-To |
| HATAA38 | 11 | 963315 | AL358613 | 399 | 1-116 |
| | | | | | 639-915 |
| | | | | | 1208-2583 |
| HATAC35 | 12 | 928004 | AC073148 | 400 | 1-352 |
| HATAC35 | 12 | 928004 | AC073148 | 401 | 1-357 |
| HATAE19 | 13 | 508525 | AC073423 | 402 | 1-395 |
| HATAE19 | 13 | 508525 | AC005045 | 403 | 1-395 |
| HATAE19 | 13 | 508525 | AC073423 | 404 | 1-105 |
| | | | | | 1689-1828 |
| | | | | | 2674-3073 |
| | | | | | 4329-4486 |
| | | | | | 5489-5518 |
| | | | | | 5521-5685 |
| | | | | | 7206-7444 |
| | | | | | 10438-10589 |
| | | | | | 10697-10894 |
| | | | | | 11299-11678 |
| | | | | | 11743-12025 |
| HATAE19 | 13 | 508525 | AC073423 | 405 | 1-171 |
| | | | | | 403-485 |
| | | | | | 1506-1668 |
| HATAE19 | 13 | 508525 | AC005045 | 406 | 1-105 |
| | | | | | 1689-1828 |
| | | | | | 2674-3073 |
| | | | | | 4329-4486 |
| | | | | | 5488-5517 |
| | | | | | 5520-5684 |
| | | | | | 7205-7443 |
| | | | | | 10437-10588 |
| | | | | | 10696-10893 |
| | | | | | 11298-11677 |
| | | | | | 11742-12024 |
| HATAE19 | 13 | 508525 | AC005045 | 407 | 1-171 |
| | | | | | 403-485 |
| | | | | | 1507-1669 |
| HATAN18 | 14 | 504600 | AL157938 | 408 | 1-65 |
| | | | | | 451-805 |
| | | | | | 1693-1946 |
| | | | | | 1987-3787 |
| | | | | | 5356-5472 |
| | | | | | 6419-6484 |
| | | | | | 6905-7261 |
| | | | | | 8236-8946 |
| | | | | | 9244-9776 |
| | | | | | 11701-12174 |
| | | | | | 12377-12832 |
| | | | | | 13070-13492 |
| | | | | | 13638-13793 |
| | | | | | 14443-15397 |
| | | | | | 15759-16468 |
| | | | | | 16726-17177 |
| | | | | | 17446-17962 |
| | | | | | 20033-20559 |
| | | | | | 27540-27696 |
| | | | | | 27985-28123 |
| | | | | | 28481-28803 |
| | | | | | 29015-29711 |
| | | | | | 31454-31689 |
| | | | | | 32787-33226 |
| | | | | | 33779-33989 |
| | | | | | 34765-34856 |
| | | | | | 35375-35539 |
| | | | | | 36025-36681 |
| | | | | | 36717-37077 |
| | | | | | 37249-37776 |
| | | | | | 38221-38476 |
| HATAN18 | 14 | 504600 | AL157938 | 409 | 1-938 |
| HATAN18 | 14 | 504600 | AL157938 | 410 | 1-244 |
| HATAQ04 | 15 | 928020 | AC021777 | 411 | 1-465 |
| HATAQ04 | 15 | 928020 | AP001889 | 412 | 1-465 |
| HATAQ04 | 15 | 928020 | AC021777 | 413 | 1-488 |
| HATAQ04 | 15 | 928020 | AP001889 | 414 | 1-264 |
| HATAQ04 | 15 | 928020 | AC021777 | 415 | 1-264 |
| HATAQ04 | 15 | 928020 | AP001889 | 416 | 1-488 |
| HATAY60 | 16 | 522934 | AC006344 | 417 | 1-337 |
| HATAY60 | 16 | 522934 | AC006344 | 418 | 1-589 |
| HATAZ55 | 17 | 889014 | AC025853 | 419 | 1-379 |
| HATAZ55 | 17 | 889014 | AC025853 | 420 | 1-115 |
| HATBB73 | 18 | 508537 | AC004742 | 421 | 1-301 |
| HATBB73 | 18 | 508537 | AC024155 | 422 | 1-301 |
| HATBB73 | 18 | 508537 | AC004742 | 423 | 1-105 |
| | | | | | 120-283 |
| HATBB73 | 18 | 508537 | AC024155 | 424 | 1-105 |
| HATBI15 | 19 | 660745 | AL139223 | 425 | 1-166 |
| | | | | | 4354-4469 |
| | | | | | 5636-5763 |
| HATBI15 | 19 | 660745 | AL390245 | 426 | 1-166 |
| | | | | | 4351-4466 |
| | | | | | 5633-5760 |
| HATBI15 | 19 | 660745 | AL139223 | 427 | 1-159 |
| HATBI15 | 19 | 660745 | AL390245 | 428 | 1-159 |
| HATBM24 | 20 | 527201 | AC015531 | 429 | 1-320 |
| HATBM24 | 20 | 527201 | AC015531 | 430 | 1-345 |
| HATCA71 | 22 | 530380 | AC007493 | 431 | 1-336 |
| HATCA71 | 22 | 530380 | AC007014 | 432 | 1-1121 |
| HATCA71 | 22 | 530380 | AC007493 | 433 | 1-367 |
| HATCA71 | 22 | 530380 | AC007014 | 434 | 1-311 |
| HATCA71 | 22 | 530380 | AC007014 | 435 | 1-367 |
| HATCB55 | 23 | 530383 | AC009118 | 436 | 1-109 |
| | | | | | 646-781 |
| | | | | | 5507-6592 |
| | | | | | 6901-7017 |
| HATCB55 | 23 | 530383 | AC009118 | 437 | 1-267 |
| HATCB55 | 23 | 530383 | AC009118 | 438 | 1-102 |
| HATCG79 | 25 | 530533 | AC031980 | 439 | 1-550 |
| | | | | | 1230-1832 |
| | | | | | 2035-2660 |
| | | | | | 2680-2799 |
| | | | | | 2911-3072 |
| | | | | | 3433-3805 |
| | | | | | 4342-4478 |
| | | | | | 4740-4947 |
| | | | | | 5539-5664 |
| HATCK46 | 26 | 530428 | AC040905 | 440 | 1-102 |
| | | | | | 134-393 |
| | | | | | 1387-1515 |
| HATCK46 | 26 | 530428 | AL359699 | 441 | 1-757 |
| | | | | | 1431-1545 |
| | | | | | 1573-1832 |
| | | | | | 2825-2953 |
| HATCK46 | 26 | 530428 | AC024004 | 442 | 1-757 |
| | | | | | 1431-1545 |
| | | | | | 1573-1832 |
| | | | | | 2825-2953 |
| HATCK46 | 26 | 530428 | AC068536 | 443 | 1-755 |
| | | | | | 1427-1541 |
| | | | | | 1569-1828 |
| | | | | | 2821-2949 |
| HATCK46 | 26 | 530428 | AC034129 | 444 | 1-757 |
| | | | | | 1431-1545 |
| | | | | | 1573-1832 |
| | | | | | 2825-2953 |
| HATCK46 | 26 | 530428 | AC027205 | 445 | 1-757 |
| | | | | | 1431-1545 |
| | | | | | 1573-1832 |
| | | | | | 2825-2953 |
| HATCK51 | 27 | 530427 | AC01060 | 446 | 1-77 |
| | | | | | 345-481 |
| | | | | | 545-1010 |
| | | | | | 1583-1697 |
| | | | | | 2493-2650 |
| | | | | | 2837-3451 |
| | | | | | 4730-4835 |
| | | | | | 5182-5829 |
| | | | | | 9699-10047 |
| | | | | | 11403-11514 |
| | | | | | 11678-11973 |
| | | | | | 12192-12291 |
| | | | | | 13625-13701 |
| | | | | | 16962-17611 |
| | | | | | 17823-18055 |
| | | | | | 18861-19036 |
| | | | | | 19356-19473 |
| | | | | | 20560-20722 |
| | | | | | 21638-22177 |
| | | | | | 22318-22971 |
| | | | | | 24639-25138 |
| | | | | | 26197-26636 |
| | | | | | 26890-26980 |
| | | | | | 28020-28693 |
| | | | | | 29326-29417 |
| | | | | | 29641-29804 |
| | | | | | 30607-30662 |
| | | | | | 31331-31653 |
| | | | | | 32112-32199 |
| | | | | | 32208-32237 |
| | | | | | 32244-32880 |
| | | | | | 33444-34424 |
| | | | | | 34677-34772 |
| | | | | | 34887-37438 |
| | | | | | 42924-43053 |
| HATCK74 | 28 | 507347 | AL356423 | 447 | 1-294 |
| HATCK74 | 28 | 507347 | AL356423 | 448 | 1-545 |
| HATCX57 | 31 | 972402 | AC012283 | 449 | 1-73 |
| | | | | | 944-1506 |
| HATCX60 | 32 | 529946 | AC010317 | 450 | 1-476 |
| HATCX60 | 32 | 529946 | AC021081 | 451 | 1-476 |
| HATCX60 | 32 | 529946 | AC012620 | 452 | 1-506 |
| HATCX60 | 32 | 529946 | AC010317 | 453 | 1-390 |
| HATCX60 | 32 | 529946 | AC021081 | 454 | 1-390 |
| HATCX60 | 32 | 529946 | AC010317 | 455 | 1-403 |
| HATCX60 | 32 | 529946 | AC021081 | 456 | 1-403 |
| HATCX60 | 32 | 529946 | AC012620 | 457 | 1-160 |
| HATCX60 | 32 | 529946 | AC012620 | 458 | 1-403 |
| HATDE50 | 34 | 461477 | AL133336 | 459 | 1-741 |
| HATDE50 | 34 | 461477 | AL365232 | 460 | 1-741 |
| HATDE50 | 34 | 461477 | AC019205 | 461 | 1-741 |
| HATDE50 | 34 | 461477 | AL133336 | 462 | 1-128 |
| HATDE50 | 34 | 461477 | AL133336 | 463 | 1-222 |
| HATDE50 | 34 | 461477 | AL365232 | 464 | 1-128 |
| HATDE50 | 34 | 461477 | AL365232 | 465 | 1-222 |
| HATDE50 | 34 | 461477 | AC019205 | 466 | 1-222 |
| HATDE50 | 34 | 461477 | AC019205 | 467 | 1-128 |
| HATDI85 | 35 | 573578 | AP002380 | 468 | 1-108 |
| | | | | | 415-693 |
| | | | | | 1580-1884 |
| HATDI85 | 35 | 573578 | AP000591 | 469 | 1-108 |
| | | | | | 415-693 |
| | | | | | 1581-1885 |
| HATDI85 | 35 | 573578 | AC004770 | 470 | 1-64 |
| | | | | | 2510-2708 |
| | | | | | 9275-9378 |
| | | | | | 10350-10457 |
| | | | | | 10764-11042 |
| | | | | | 11930-12234 |
| | | | | | 14546-14681 |
| | | | | | 16438-16821 |
| | | | | | 18462-18977 |
| | | | | | 19103-19250 |
| | | | | | 19633-19769 |
| | | | | | 22432-22701 |
| | | | | | 23254-23683 |
| | | | | | 24162-24782 |
| | | | | | 25160-25255 |
| | | | | | 25468-25567 |
| | | | | | 25893-25975 |
| | | | | | 26012-26418 |
| | | | | | 27341-27468 |
| | | | | | 27824-29543 |
| HATDI85 | 35 | 573578 | AC004228 | 471 | 1-64 |
| | | | | | 2510-2708 |
| | | | | | 10346-10453 |
| | | | | | 10760-11038 |
| | | | | | 11926-12230 |
| | | | | | 12480-12581 |
| | | | | | 16416-16799 |
| | | | | | 18440-18955 |
| | | | | | 19081-19228 |
| | | | | | 19611-19747 |
| | | | | | 22012-22296 |
| | | | | | 22410-22679 |
| | | | | | 23232-23659 |
| | | | | | 24138-24760 |
| | | | | | 25138-25233 |
| | | | | | 25446-25545 |
| | | | | | 25871-25953 |
| | | | | | 25990-26396 |
| | | | | | 27319-27446 |
| | | | | | 27802-29521 |
| HATDI85 | 35 | 573578 | AF139813 | 472 | 1-108 |
| | | | | | 415-693 |
| | | | | | 1581-1885 |
| HATDI85 | 35 | 573578 | AP000591 | 473 | 1-276 |
| HATDI85 | 35 | 573578 | AP002380 | 474 | 1-102 |
| HATDI85 | 35 | 573578 | AP000591 | 475 | 1-102 |
| HATDI85 | 35 | 573578 | AC004770 | 476 | 1-156 |
| HATDI85 | 35 | 573578 | AC004228 | 477 | 1-152 |
| HATDI85 | 35 | 573578 | AF139813 | 478 | 1-102 |
| HATDI85 | 35 | 573578 | AF139813 | 479 | 1-276 |
| HATDL29 | 36 | 848053 | AL139184 | 480 | 1-503 |
| | | | | | 555-3016 |
| HATDL29 | 36 | 848053 | AL138960 | 481 | 1-1841 |
| | | | | | 3781-3925 |
| | | | | | 4346-4848 |
| | | | | | 4900-7361 |
| HATDL29 | 36 | 848053 | AL139184 | 482 | 1-145 |
| HATDN54 | 37 | 573622 | AL034375 | 483 | 1-1326 |
| HATDN54 | 37 | 573622 | AL138883 | 484 | 1-1326 |
| HATDN54 | 37 | 573622 | AL034375 | 485 | 1-492 |
| HATDN54 | 37 | 573622 | AL034375 | 486 | 1-166 |
| HATDN54 | 37 | 573622 | AL138883 | 487 | 1-492 |
| HATDN54 | 37 | 573622 | AL138883 | 488 | 1-166 |
| HATDR20 | 39 | 573535 | AC003681 | 489 | 1-210 |
| HATDT90 | 40 | 524177 | AL049631 | 490 | 1-4109 |
| HATDT90 | 40 | 524177 | AL049631 | 491 | 1-2000 |
| HATDT90 | 40 | 524177 | AL049631 | 492 | 1-331 |
| HATEH76 | 41 | 878096 | AC068080 | 493 | 1-764 |
| | | | | | 1632-2271 |
| HATEH76 | 41 | 878096 | AC068080 | 494 | 1-321 |
| HATEH76 | 41 | 878096 | AC068080 | 495 | 1-2053 |
| | | | | | 2460-2637 |
| | | | | | 2728-3254 |
| | | | | | 3350-3499 |
| | | | | | 4596-4764 |
| | | | | | 5524-5918 |
| HEFMB58 | 42 | 665206 | AC011495 | 496 | 1-475 |
| HEFMB58 | 42 | 665206 | AC011495 | 497 | 1-186 |
| HEFMB58 | 42 | 665206 | AC011495 | 498 | 1-172 |
| HEFME17 | 43 | 662268 | AC007626 | 499 | 1-788 |
| HEFME17 | 43 | 662268 | AP000065 | 500 | 1-266 |
| | | | | | 1491-1791 |
| | | | | | 2263-2824 |
| | | | | | 3147-3366 |
| | | | | | 3421-3527 |
| | | | | | 4570-4740 |
| | | | | | 4871-5058 |
| | | | | | 5702-5799 |
| | | | | | 5844-6172 |
| | | | | | 6314-6369 |
| | | | | | 6408-8319 |
| HEFME17 | 43 | 662268 | AC007626 | 501 | 1-1638 |
| | | | | | 1649-1775 |
| | | | | | 1801-1970 |
| | | | | | 2007-2425 |
| HEFME17 | 43 | 662268 | AC007626 | 502 | 1-266 |
| | | | | | 1491-1791 |
| | | | | | 2263-2823 |
| | | | | | 3146-3365 |
| | | | | | 3420-3526 |
| | | | | | 4569-4739 |
| | | | | | 4870-5057 |
| | | | | | 5701-5798 |
| | | | | | 5843-6171 |
| | | | | | 6313-6368 |
| | | | | | 6407-7471 |
| HEFME17 | 43 | 662268 | AP000065 | 503 | 1-1369 |
| | | | | | 1397-1637 |
| | | | | | 1648-1774 |
| | | | | | 2012-2113 |
| HIABC73 | 44 | 509663 | AL353727 | 504 | 1-695 |
| HIABC73 | 44 | 509663 | AC009144 | 505 | 1-473 |
| | | | | | 2134-2280 |
| | | | | | 2519-2752 |
| | | | | | 3017-3515 |
| | | | | | 4322-4545 |
| | | | | | 4663-4744 |
| | | | | | 4846-5022 |
| | | | | | 5917-6025 |
| | | | | | 6547-7445 |
| | | | | | 8830-8943 |
| | | | | | 9061-9567 |
| | | | | | 10214-10440 |
| | | | | | 11373-11403 |
| | | | | | 12445-13139 |
| | | | | | 13660-13838 |
| | | | | | 14256-14346 |
| HIABC73 | 44 | 509663 | AL353727 | 506 | 1-98 |
| HIABC73 | 44 | 509663 | AC009144 | 507 | 1-635 |
| HIABI65 | 45 | 753952 | AC018636 | 508 | 1-528 |
| HIABI65 | 45 | 753952 | AC008026 | 509 | 1-702 |
| HIABI65 | 45 | 753952 | AC018636 | 510 | 1-702 |
| HIABI65 | 45 | 753952 | AC018636 | 511 | 1-687 |
| HIABI65 | 45 | 753952 | AC008026 | 512 | 1-583 |
| HIABI65 | 45 | 753952 | AC018636 | 513 | 1-583 |
| HIATE15 | 46 | 715747 | AL354836 | 514 | 1-1144 |
| | | | | | 1153-1254 |
| | | | | | 1431-1808 |
| | | | | | 2120-2403 |
| | | | | | 2999-3325 |
| | | | | | 3488-3951 |
| | | | | | 4250-4603 |
| | | | | | 4659-5166 |
| | | | | | 5827-6067 |
| | | | | | 6261-6563 |
| | | | | | 7880-7923 |
| | | | | | 8110-8412 |
| | | | | | 8427-8613 |
| | | | | | 9144-9297 |
| | | | | | 9720-11889 |
| | | | | | 12125-12613 |
| HIATE15 | 46 | 715747 | AL078633 | 515 | 1-826 |
| | | | | | 863-1258 |
| | | | | | 1432-1809 |
| | | | | | 2121-2415 |
| | | | | | 3004-3330 |
| | | | | | 3493-3956 |
| | | | | | 4130-4231 |
| | | | | | 4255-4608 |
| | | | | | 4664-5171 |
| | | | | | 5832-6072 |
| | | | | | 6266-6568 |
| | | | | | 6583-6867 |
| | | | | | 7302-7455 |
| | | | | | 7878-9973 |
| | | | | | 9977-10046 |
| | | | | | 10282-10770 |
| HIATE15 | 46 | 715747 | AL354836 | 516 | 1-1392 |
| HIATE15 | 46 | 715747 | AL354836 | 517 | 1-262 |
| HIATE15 | 46 | 715747 | AL078633 | 518 | 1-262 |
| HIATE15 | 46 | 715747 | AL078633 | 519 | 1-1392 |
| HNHHD37 | 48 | 844843 | AC009230 | 520 | 1-647 |
| HPDCA64 | 49 | 509426 | AL117351 | 521 | 1-403 |
| HPDCA64 | 49 | 509426 | AL117351 | 522 | 1-291 |
| HPDCA64 | 49 | 509426 | AL117351 | 523 | 1-234 |
| HPDEG54 | 51 | 522679 | AC007490 | 524 | 1-267 |
| | | | | | 676-1137 |
| | | | | | 2181-2862 |
| | | | | | 4321-4550 |
| | | | | | 4915-5078 |
| | | | | | 6190-6270 |
| | | | | | 8620-9185 |
| | | | | | 9504-9609 |
| | | | | | 10577-12541 |
| HPDEG54 | 51 | 522679 | AC007501 | 525 | 1-267 |
| | | | | | 676-1137 |
| | | | | | 2181-2862 |
| | | | | | 4321-4550 |
| | | | | | 4915-5078 |
| | | | | | 6190-6270 |
| | | | | | 8620-9185 |
| | | | | | 10577-12541 |
| HPDEG54 | 51 | 522679 | AC007490 | 526 | 1-506 |
| | | | | | 562-1069 |
| HPDEG54 | 51 | 522679 | AC007490 | 527 | 1-228 |
| HPDEG54 | 51 | 522679 | AC007501 | 528 | 1-506 |
| | | | | | 562-1069 |
| HPDEG54 | 51 | 522679 | AC007501 | 529 | 1-228 |
| HPDEK41 | 52 | 508547 | AL162724 | 530 | 1-377 |
| HPDEK41 | 52 | 508547 | AL162724 | 531 | 1-375 |
| HPDEK41 | 52 | 508547 | AL162724 | 532 | 1-373 |
| HPTAC80 | 53 | 671552 | AP000573 | 533 | 1-2261 |
| | | | | | 2694-2964 |
| | | | | | 2996-3384 |
| | | | | | 3601-3726 |
| | | | | | 3898-4365 |
| | | | | | 5055-5253 |
| | | | | | 5680-5798 |
| | | | | | 5977-5997 |
| HPTAC80 | 53 | 671552 | AP001453 | 534 | 1-2066 |
| HPTAC80 | 53 | 671552 | AC005848 | 535 | 1-2360 |
| | | | | | 2793-3063 |
| | | | | | 3095-3483 |
| | | | | | 3700-3825 |
| | | | | | 3997-4464 |
| | | | | | 5154-5352 |
| | | | | | 5779-5897 |
| | | | | | 5963-6093 |
| HPTAC80 | 53 | 671552 | AC005848 | 536 | 1-107 |
| HPTAC80 | 53 | 671552 | AC005848 | 537 | 1-415 |
| | | | | | 647-827 |
| | | | | | 917-1166 |
| | | | | | 1956-2095 |
| | | | | | 2129-2380 |
| | | | | | 2994-3094 |
| | | | | | 3329-3736 |
| HPTBA43 | 54 | 573878 | AL365403 | 538 | 1-400 |
| HPTBA43 | 54 | 573878 | AL365403 | 539 | 1-60 |
| | | | | | 1784-2449 |
| HPTRD50 | 59 | 710425 | AC011951 | 540 | 1-400 |
| HPTRD50 | 59 | 710425 | AC048370 | 541 | 1-400 |
| HPTRD50 | 59 | 710425 | AC048370 | 542 | 1-133 |
| | | | | | 175-2281 |
| | | | | | 2283-6245 |
| HPTRE22 | 60 | 589333 | AC005789 | 543 | 1-83 |
| | | | | | 97-399 |
| | | | | | 425-603 |
| | | | | | 1593-1679 |
| | | | | | 1774-2115 |
| | | | | | 2210-2286 |
| | | | | | 2384-2875 |
| | | | | | 2912-2997 |
| | | | | | 3481-3946 |
| | | | | | 4535-4856 |
| | | | | | 5152-6385 |
| | | | | | 6823-6871 |
| HPTRE22 | 60 | 589333 | AC005789 | 544 | 1-180 |
| HPTRE22 | 60 | 589333 | AC005789 | 545 | 1-89 |
| | | | | | 879-992 |
| | | | | | 1109-1391 |
| HPTRE26 | 61 | 576790 | AC013489 | 546 | 1-54 |
| | | | | | 288-450 |
| | | | | | 1429-1741 |
| | | | | | 4020-4281 |
| | | | | | 4335-4527 |
| HPTRE26 | 61 | 576790 | AC013489 | 547 | 1-190 |
| HPTRE26 | 61 | 576790 | AC013489 | 548 | 1-193 |
| HPTRG91 | 62 | 773605 | AC010319 | 549 | 1-862 |
| HPTRG91 | 62 | 773605 | AC010319 | 550 | 1-386 |
| HPTRG91 | 62 | 773605 | AC010319 | 551 | 1-217 |
| | | | | | 1678-1780 |
| HPTRJ48 | 63 | 575987 | AC016292 | 552 | 1-340 |
| HPTRJ48 | 63 | 575987 | AC015884 | 553 | 1-702 |
| HPTRJ48 | 63 | 575987 | AC015884 | 554 | 1-387 |
| HPTRJ48 | 63 | 575987 | AC015884 | 555 | 1-237 |
| HPTRL28 | 65 | 575991 | AC073492 | 556 | 1-647 |
| HPTRL28 | 65 | 575991 | AC073492 | 557 | 1-104 |
| HPTRL32 | 66 | 964772 | AL136135 | 558 | 1-450 |
| HPTRL32 | 66 | 964772 | AL136135 | 559 | 1-256 |
| HPTRN57 | 68 | 916998 | AC023148 | 560 | 1-575 |
| HPTRN57 | 68 | 916998 | AC073177 | 561 | 1-576 |
| HPTRN57 | 68 | 916998 | AC016905 | 562 | 1-575 |
| HPTRN57 | 68 | 916998 | AC023148 | 563 | 1-733 |
| | | | | | 981-1381 |
| | | | | | 1701-2072 |
| HPTRN57 | 68 | 916998 | AC073177 | 564 | 1-733 |
| | | | | | 981-1381 |
| | | | | | 1702-2073 |
| HPTRN57 | 68 | 916998 | AC016905 | 565 | 1-733 |
| | | | | | 981-1381 |
| | | | | | 1701-2072 |
| HPTRO02 | 69 | 920338 | AC012004 | 566 | 1-712 |
| HPTRO02 | 69 | 920338 | AL031713 | 567 | 1-712 |
| HPTRO02 | 69 | 920338 | AC009041 | 568 | 1-712 |
| HPTRO02 | 69 | 920338 | AC012004 | 569 | 1-402 |
| HPTRO02 | 69 | 920338 | AL031713 | 570 | 1-705 |
| HPTRO02 | 69 | 920338 | AC009041 | 571 | 1-705 |
| HPTRS54 | 71 | 953674 | AC023920 | 572 | 1-532 |
| HPTRS61 | 72 | 841701 | AL021453 | 573 | 1-316 |
| | | | | | 620-664 |
| HPTRS63 | 73 | 675992 | AC000395 | 574 | 1-2432 |
| | | | | | 2497-3708 |
| | | | | | 3806-4434 |
| | | | | | 4767-4863 |
| | | | | | 5071-5195 |
| | | | | | 5521-5554 |
| | | | | | 5900-6126 |
| | | | | | 6554-6625 |
| | | | | | 8202-8287 |
| | | | | | 8687-8790 |
| | | | | | 8912-9045 |
| | | | | | 9344-9569 |
| | | | | | 9690-10213 |
| | | | | | 10255-10715 |
| | | | | | 10941-11617 |
| | | | | | 11884-12000 |
| | | | | | 12056-12472 |
| | | | | | 12562-12757 |
| | | | | | 14310-14637 |
| HPTRS63 | 73 | 675992 | AC000395 | 575 | 1-117 |
| HPTRV21 | 74 | 953489 | AC005258 | 576 | 1-177 |
| | | | | | 305-1308 |
| | | | | | 1398-1947 |
| | | | | | 2215-2671 |
| | | | | | 3326-4438 |
| | | | | | 4503-5157 |
| | | | | | 5390-5663 |
| | | | | | 6005-6316 |
| | | | | | 6537-7044 |
| HPTRV21 | 74 | 953489 | AC005258 | 577 | 1-2506 |
| | | | | | 4018-4341 |
| | | | | | 4596-4718 |
| | | | | | 7408-7743 |
| | | | | | 8558-8896 |
| | | | | | 8970-9022 |
| | | | | | 9086-9200 |
| | | | | | 9743-10006 |
| | | | | | 10538-10646 |
| HPTTA18 | 77 | 954361 | AC011887 | 578 | 1-357 |
| HPTTA18 | 77 | 954361 | AC011887 | 579 | 1-309 |
| HPTTB59 | 78 | 522659 | AC026033 | 580 | 1-356 |
| HPTTB59 | 78 | 522659 | AC026033 | 581 | 1-246 |
| HPTTB59 | 78 | 522659 | AC026033 | 582 | 1-98 |
| HPTTK61 | 80 | 951024 | AC022898 | 583 | 1-406 |
| HPTTK61 | 80 | 951024 | AC022898 | 584 | 1-882 |
| HPTTL50 | 81 | 693555 | AC020873 | 585 | 1-306 |
| HPTTL50 | 81 | 693555 | AC027442 | 586 | 1-307 |
| HPTTL50 | 81 | 693555 | AL355975 | 587 | 1-322 |
| HPTTL50 | 81 | 693555 | AL358115 | 588 | 1-142 |
| HPTTL50 | 81 | 693555 | AC021162 | 589 | 1-308 |
| HPTTL50 | 81 | 693555 | AC027105 | 590 | 1-308 |
| HPTTL50 | 81 | 693555 | AC026488 | 591 | 1-308 |
| HPTTL50 | 81 | 693555 | AL157766 | 592 | 1-303 |
| HPTTL50 | 81 | 693555 | AL355312 | 593 | 1-142 |
| HPTTL50 | 81 | 693555 | AC068519 | 594 | 1-312 |
| HPTTL50 | 81 | 693555 | AL356441 | 595 | 1-289 |
| HPTTL50 | 81 | 693555 | AC027234 | 596 | 1-318 |
| HPTTL50 | 81 | 693555 | AC025899 | 597 | 1-148 |
| HPTTL50 | 81 | 693555 | AC023968 | 598 | 1-306 |
| HPTTL50 | 81 | 693555 | AC009868 | 599 | 1-322 |
| HPTTL50 | 81 | 693555 | AC073446 | 600 | 1-299 |
| HPTTL50 | 81 | 693555 | AC072051 | 601 | 1-310 |
| HPTTL50 | 81 | 693555 | AC022950 | 602 | 1-311 |
| HPTTL50 | 81 | 693555 | AL354924 | 603 | 1-182 |
| HPTTL50 | 81 | 693555 | AP001787 | 604 | 1-181 |
| HPTTL50 | 81 | 693555 | AC025425 | 605 | 1-287 |
| HPTTL50 | 81 | 693555 | AL353139 | 606 | 1-316 |
| HPTTL50 | 81 | 693555 | AL354657 | 607 | 1-305 |
| HPTTL50 | 81 | 693555 | AC013758 | 608 | 1-316 |
| HPTTL50 | 81 | 693555 | AC006512 | 609 | 1-658 |
| | | | | | 3090-3543 |
| | | | | | 4479-5105 |
| | | | | | 5885-6846 |
| | | | | | 7103-9707 |
| | | | | | 9914-10293 |
| | | | | | 11523-12034 |
| | | | | | 12067-12181 |
| | | | | | 13769-14031 |
| | | | | | 14199-14291 |
| | | | | | 14584-14790 |
| | | | | | 15123-15154 |
| | | | | | 17039-17482 |
| | | | | | 17539-17987 |
| | | | | | 18697-19052 |
| | | | | | 19112-19380 |
| | | | | | 20023-20268 |
| | | | | | 21158-21598 |
| | | | | | 21817-22221 |
| | | | | | 23565-23665 |
| | | | | | 23906-24076 |
| | | | | | 24981-25506 |
| | | | | | 25510-25861 |
| | | | | | 25981-26645 |
| | | | | | 26661-27449 |
| | | | | | 27717-27812 |
| | | | | | 27991-28024 |
| | | | | | 28437-28888 |
| | | | | | 29651-33442 |
| | | | | | 33621-34089 |
| | | | | | 34245-34808 |
| | | | | | 34819-35284 |
| | | | | | 35854-35960 |
| | | | | | 38525-38771 |
| HPTTL50 | 81 | 693555 | AC006319 | 610 | 1-440 |
| HPTTL50 | 81 | 693555 | AC020873 | 611 | 1-126 |
| HPTTL50 | 81 | 693555 | AL358115 | 612 | 1-2327 |
| HPTTL50 | 81 | 693555 | AC006512 | 613 | 1-315 |
| | | | | | 439-531 |
| | | | | | 707-1080 |
| | | | | | 1144-1227 |
| | | | | | 1491-1845 |
| | | | | | 2113-2321 |
| | | | | | 2700-3556 |
| | | | | | 3818-4307 |
| | | | | | 4336-4813 |
| | | | | | 4958-5775 |
| HPTTL50 | 81 | 693555 | AC006512 | 614 | 1-738 |
| HPTTL50 | 81 | 693555 | AC006319 | 615 | 1-243 |
| HPTTL53 | 82 | 526246 | AC068357 | 616 | 1-283 |
| HPTTL53 | 82 | 526246 | AC022770 | 617 | 1-560 |
| HPTTL53 | 82 | 526246 | AP002495 | 618 | 1-283 |
| HPTTL53 | 82 | 526246 | AC068357 | 619 | 1-666 |
| HPTTL53 | 82 | 526246 | AC022770 | 620 | 1-235 |
| | | | | | 296-1262 |
| | | | | | 1613-3923 |
| | | | | | 4001-4499 |
| | | | | | 4796-5221 |
| | | | | | 5242-5600 |
| | | | | | 5713-8471 |
| HPTTL53 | 82 | 526246 | AP002495 | 621 | 1-1745 |
| | | | | | 1823-2321 |
| | | | | | 3500-6395 |
| HPTTU76 | 84 | 771294 | AC012354 | 622 | 1-215 |
| HPTTU76 | 84 | 771294 | AC016841 | 623 | 1-215 |
| HPTTU76 | 84 | 771294 | AC062030 | 624 | 1-215 |
| HPTTU76 | 84 | 771294 | AC012354 | 625 | 1-1384 |
| HPTTU76 | 84 | 771294 | AC012354 | 626 | 1-446 |
| HPTTU76 | 84 | 771294 | AC016841 | 627 | 1-446 |
| HPTTU76 | 84 | 771294 | AC062030 | 628 | 1-1381 |
| HPTTU76 | 84 | 771294 | AC016841 | 629 | 1-1386 |
| HPTTU76 | 84 | 771294 | AC062030 | 630 | 1-446 |
| HPTVA78 | 85 | 575989 | AC018704 | 631 | 1-382 |
| HPTVC63 | 86 | 576794 | AC023008 | 632 | 1-296 |
| HPTVC63 | 86 | 576794 | AC016771 | 633 | 1-566 |
| | | | | | 1718-1892 |
| | | | | | 2063-2402 |
| | | | | | 2463-2760 |
| | | | | | 3136-3652 |
| | | | | | 3744-4188 |
| | | | | | 4225-4341 |
| | | | | | 4379-5167 |
| HPTVC63 | 86 | 576794 | L48038 | 634 | 1-307 |
| HPTVD46 | 87 | 575986 | AC024680 | 635 | 1-263 |
| | | | | | 3491-3564 |
| | | | | | 3971-4278 |
| | | | | | 5417-5896 |
| | | | | | 7652-7916 |
| | | | | | 8316-8417 |
| HPTVI60 | 90 | 575971 | AL357774 | 636 | 1-491 |
| | | | | | 508-931 |
| HPTVI60 | 90 | 575971 | AL356578 | 637 | 1-491 |
| | | | | | 508-931 |
| HPTVJ51 | 91 | 724992 | AC009408 | 638 | 1-527 |
| HPTVJ51 | 91 | 724992 | AC009309 | 639 | 1-527 |
| HPTVJ51 | 91 | 724992 | AC009408 | 640 | 1-128 |
| HPTVJ51 | 91 | 724992 | AC009309 | 641 | 1-128 |
| HPTVK12 | 92 | 970825 | AL158834 | 642 | 1-319 |
| HPTVP65 | 93 | 575973 | AL160270 | 643 | 1-212 |
| | | | | | 1480-1986 |
| HPTVP65 | 93 | 575973 | AL160270 | 644 | 1-112 |
| HPTVQ26 | 94 | 867345 | AC025684 | 645 | 1-35 |
| | | | | | 211-389 |
| | | | | | 570-593 |
| | | | | | 1301-1631 |
| HPTVQ26 | 94 | 867345 | AC013469 | 646 | 1-35 |
| | | | | | 211-389 |
| | | | | | 570-593 |
| | | | | | 1301-1631 |
| HPTVQ26 | 94 | 867345 | AC025684 | 647 | 1-398 |
| HPTVQ26 | 94 | 867345 | AC013469 | 648 | 1-398 |
| HPTVV37 | 95 | 576733 | AC013591 | 649 | 1-1426 |
| | | | | | 1680-1795 |
| | | | | | 2138-2252 |
| | | | | | 2585-3134 |
| | | | | | 4564-4646 |
| | | | | | 4906-4972 |
| | | | | | 5245-5389 |
| | | | | | 5996-6105 |
| | | | | | 6504-6591 |
| | | | | | 6842-7429 |
| | | | | | 7614-8299 |
| | | | | | 9055-9144 |
| | | | | | 9356-9501 |
| | | | | | 10527-10983 |
| | | | | | 11998-12069 |
| | | | | | 15684-16083 |
| | | | | | 17254-17337 |
| | | | | | 20001-20097 |
| HPTVV37 | 95 | 576733 | AC013591 | 650 | 1-280 |
| | | | | | 1091-1200 |
| HPTWG27 | 98 | 506242 | AL138781 | 651 | 1-79 |
| | | | | | 167-338 |
| | | | | | 1247-1322 |
| | | | | | 1539-2738 |
| HPTWG27 | 98 | 506242 | AL138781 | 652 | 1-106 |
| HPTXN72 | 100 | 761488 | AC007834 | 653 | 1-426 |
| | | | | | 603-1295 |
| HPYAA23 | 103 | 592397 | AC023089 | 654 | 1-540 |
| HPYAA23 | 103 | 592397 | AL359252 | 655 | 1-540 |
| HPYAA23 | 103 | 592397 | AC022942 | 656 | 1-540 |
| HPYAA23 | 103 | 592397 | AC023089 | 657 | 1-332 |
| HPYAA23 | 103 | 592397 | AL359252 | 658 | 1-332 |
| HPYAA23 | 103 | 592397 | AC022942 | 659 | 1-332 |
| HTNBR88 | 104 | 519756 | AF230667 | 660 | 1-110 |
| | | | | | 1156-1297 |
| | | | | | 2771-2868 |
| | | | | | 4390-5025 |
| | | | | | 5225-5556 |
| | | | | | 6105-6264 |
| HTNBR88 | 104 | 519756 | AC069434 | 661 | 1-110 |
| | | | | | 1157-1298 |
| | | | | | 2772-2869 |
| | | | | | 4391-5026 |
| | | | | | 5226-5557 |
| | | | | | 6109-6268 |
| HTNBR88 | 104 | 519756 | AF230666 | 662 | 1-110 |
| | | | | | 1157-1298 |
| | | | | | 2772-2869 |
| | | | | | 4391-5026 |
| | | | | | 5226-5548 |
| | | | | | 6107-6266 |
| HTNBY41 | 107 | 747239 | AC027116 | 663 | 1-1693 |
| | | | | | 1717-7569 |
| HTNBY41 | 107 | 747239 | AC011768 | 664 | 1-1693 |
| | | | | | 1717-7569 |
| HTNBY41 | 107 | 747239 | AC021329 | 665 | 1-1693 |
| | | | | | 1717-7569 |
| HTNBY41 | 107 | 747239 | AC027116 | 666 | 1-649 |
| | | | | | 882-1184 |
| | | | | | 1299-1961 |
| | | | | | 2047-2667 |
| | | | | | 3610-3868 |
| | | | | | 3955-4336 |
| | | | | | 4510-4852 |
| | | | | | 5580-5663 |
| | | | | | 6253-6350 |
| | | | | | 7014-7355 |
| | | | | | 8480-8896 |
| HTNBY41 | 107 | 747239 | AC011768 | 667 | 1-649 |
| | | | | | 882-1184 |
| | | | | | 1299-1960 |
| | | | | | 2046-2666 |
| HTNBY41 | 107 | 747239 | AC021329 | 668 | 1-649 |
| | | | | | 882-1184 |
| | | | | | 1299-1960 |
| | | | | | 2046-2666 |
| | | | | | 3609-3867 |
| | | | | | 3954-4335 |
| | | | | | 4509-4851 |
| | | | | | 5579-5662 |
| | | | | | 6252-6349 |
| | | | | | 7013-7354 |
| | | | | | 8479-8895 |
| HTNBT32 | 109 | 702974 | AL049611 | 669 | 1-165 |
| | | | | | 335-911 |
| | | | | | 1853-2122 |
| | | | | | 5376-6516 |
| HTNBO21 | 111 | 870052 | AL359700 | 670 | 1-950 |
| HTNBN03 | 112 | 960877 | AC010550 | 671 | 1-127 |
| HTNBN03 | 112 | 960877 | AC007828 | 672 | 1-1043 |
| HTNBE16 | 113 | 667653 | AC010799 | 673 | 1-113 |
| | | | | | 284-1123 |
| | | | | | 1141-1864 |
| | | | | | 2352-2764 |
| | | | | | 3594-3932 |
| | | | | | 5605-6252 |
| HTNBE16 | 113 | 667653 | AC009673 | 674 | 1-113 |
| | | | | | 285-1126 |
| | | | | | 1144-1866 |
| | | | | | 2354-2766 |
| | | | | | 3599-3937 |
| | | | | | 5610-6254 |
| HTNBE16 | 113 | 667653 | AC009673 | 675 | 1-90 |
| | | | | | 102-556 |
| | | | | | 560-685 |
| HTNBE16 | 113 | 667653 | AC010799 | 676 | 1-190 |
| HTNAU71 | 114 | 764772 | AC023524 | 677 | 1-655 |
| HTNAU71 | 114 | 764772 | AC023524 | 678 | 1-1798 |
| HTNAU71 | 114 | 764772 | AC023524 | 679 | 1-513 |
| HTNAO78 | 117 | 773906 | AC006312 | 680 | 1-395 |
| | | | | | 407-1052 |
| | | | | | 2090-2221 |
| | | | | | 2608-2705 |
| | | | | | 3245-3347 |
| | | | | | 3542-3934 |
| | | | | | 4847-5734 |
| | | | | | 5975-6244 |
| | | | | | 6329-6718 |
| | | | | | 7054-7846 |
| | | | | | 8300-9356 |
| | | | | | 9438-10410 |
| | | | | | 10940-11538 |
| HTNAO78 | 117 | 773906 | AC006312 | 681 | 1-276 |
| | | | | | 499-1675 |
| | | | | | 2091-2333 |
| | | | | | 4232-4282 |
| | | | | | 4455-5232 |
| | | | | | 6242-6970 |
| | | | | | 7182-7481 |
| | | | | | 7977-8098 |
| | | | | | 8744-8899 |
| | | | | | 9163-9247 |
| | | | | | 10920-10984 |
| | | | | | 12504-12581 |
| | | | | | 13430-13629 |
| | | | | | 14388-14696 |
| | | | | | 15345-15477 |
| | | | | | 16954-17086 |
| | | | | | 17114-17792 |
| HTNAM62 | 119 | 742407 | AL157391 | 682 | 1-667 |
| HTNAM62 | 119 | 742407 | AL157391 | 683 | 1-509 |
| HTNAM62 | 119 | 742407 | AL157391 | 684 | 1-79 |
| | | | | | 352-1515 |
| HTNAM36 | 120 | 708319 | AC067817 | 685 | 1-351 |
| | | | | | 378-546 |
| | | | | | 562-4699 |
| HTNAM05 | 121 | 932848 | AC010193 | 686 | 1-492 |
| HTNAM05 | 121 | 932848 | AC010193 | 687 | 1-258 |
| HTNAC78 | 122 | 772786 | AP001085 | 688 | 1-66 |
| | | | | | 1780-2680 |
| HTNAC78 | 122 | 772786 | AC025956 | 689 | 1-66 |
| | | | | | 1780-2681 |
| | | | | | 2833-5532 |
| HTNAC78 | 122 | 772786 | AP001280 | 690 | 1-66 |
| | | | | | 1780-2679 |
| | | | | | 2831-7166 |
| HPYAA82 | 123 | 781551 | AC004873 | 691 | 1-82 |
| | | | | | 933-1376 |
| | | | | | 1625-1764 |
| | | | | | 1884-1931 |
| | | | | | 2454-2556 |
| | | | | | 2659-3016 |
| | | | | | 3534-3877 |
| | | | | | 4078-4536 |
| | | | | | 5049-7047 |
| | | | | | 7511-7549 |
| HPYAA82 | 123 | 781551 | AL034380 | 692 | 1-82 |
| | | | | | 933-1376 |
| | | | | | 1625-1764 |
| | | | | | 1884-1931 |
| | | | | | 2454-2556 |
| | | | | | 2659-3016 |
| | | | | | 3534-3877 |
| | | | | | 4078-4536 |
| | | | | | 5049-7047 |
| | | | | | 7511-7549 |
| HPYAA82 | 123 | 781551 | AC004873 | 693 | 1-407 |
| HPYAA82 | 123 | 781551 | AC004873 | 694 | 1-118 |
| HPYAA82 | 123 | 781551 | AL034380 | 695 | 1-407 |
| HPYAA82 | 123 | 781551 | AL034380 | 696 | 1-118 |
| HPYAA77 | 124 | 591652 | AC016691 | 697 | 1-873 |
| HPYAA77 | 124 | 591652 | AC068092 | 698 | 1-873 |
| HPYAA77 | 124 | 591652 | AC016691 | 699 | 1-427 |
| HPYAA77 | 124 | 591652 | AC068092 | 700 | 1-427 |
| HPYAA44 | 125 | 503594 | AC007319 | 701 | 1-39 |
| | | | | | 3389-3567 |
| | | | | | 4162-4253 |
| | | | | | 4554-5111 |
| | | | | | 9321-9800 |
| HPYAA44 | 125 | 503594 | AC007319 | 702 | 1-110 |
| HPTSJ47 | 127 | 720643 | AP001809 | 703 | 1-964 |
| HPTSJ47 | 127 | 720643 | AC019071 | 704 | 1-1207 |
| HPTSJ47 | 127 | 720643 | AP001809 | 705 | 1-440 |
| HPTSJ47 | 127 | 720643 | AC019071 | 706 | 1-440 |
| HPTRL10 | 129 | 964781 | AP000928 | 707 | 1-28 |
| | | | | | 402-505 |
| | | | | | 688-873 |
| | | | | | 986-2438 |
| | | | | | 2617-2719 |
| | | | | | 2972-3197 |
| | | | | | 3994-4117 |
| | | | | | 4253-4315 |
| | | | | | 4371-4431 |
| | | | | | 5278-5394 |
| | | | | | 5483-5540 |
| | | | | | 6978-7164 |
| | | | | | 7433-7794 |
| | | | | | 7812-8120 |
| | | | | | 8175-9129 |
| HPTRL10 | 129 | 964781 | AP000814 | 708 | 1-28 |
| | | | | | 405-508 |
| | | | | | 695-881 |
| | | | | | 994-2444 |
| | | | | | 2623-2725 |
| | | | | | 2979-3204 |
| | | | | | 4001-4124 |
| | | | | | 4260-4322 |
| | | | | | 4378-4438 |
| | | | | | 5285-5401 |
| | | | | | 5490-5547 |
| | | | | | 6988-7174 |
| | | | | | 7443-7804 |
| | | | | | 7822-8119 |
| | | | | | 8181-9134 |
| HPTRL10 | 129 | 964781 | AC000159 | 709 | 1-28 |
| | | | | | 402-505 |
| | | | | | 692-878 |
| | | | | | 991-2441 |
| | | | | | 2620-2722 |
| | | | | | 2975-3200 |
| | | | | | 3997-4120 |
| | | | | | 4256-4318 |
| | | | | | 4374-4434 |
| | | | | | 5281-5397 |
| | | | | | 5486-5543 |
| | | | | | 6985-7171 |
| | | | | | 7440-7801 |
| | | | | | 7819-8127 |
| | | | | | 8182-9157 |
| | | | | | 9936-10241 |
| | | | | | 10272-10929 |
| HPTRA75 | 131 | 586339 | Z83838 | 710 | 1-576 |
| HPTRA75 | 131 | 586339 | Z83838 | 711 | 1-630 |
| HPTRA75 | 131 | 586339 | Z83838 | 712 | 1-172 |
| HPDEF87 | 132 | 506557 | AC036110 | 713 | 1-869 |
| HPDEF87 | 132 | 506557 | AL160492 | 714 | 1-869 |
| HPDEF87 | 132 | 506557 | AC036110 | 715 | 1-310 |
| HPDEF87 | 132 | 506557 | AC036110 | 716 | 1-376 |
| HPDEF87 | 132 | 506557 | AL160492 | 717 | 1-311 |
| HPDEF87 | 132 | 506557 | AL160492 | 718 | 1-476 |
| HPDDZ29 | 133 | 835822 | AC025574 | 719 | 1-159 |
| | | | | | 259-399 |
| | | | | | 533-999 |
| | | | | | 1349-1822 |
| | | | | | 1920-3154 |
| HPDDZ29 | 133 | 835822 | AC023500 | 720 | 1-86 |
| | | | | | 386-512 |
| | | | | | 600-806 |
| | | | | | 913-1292 |
| | | | | | 1501-1602 |
| | | | | | 1718-1794 |
| | | | | | 1896-1916 |
| | | | | | 1978-2486 |
| | | | | | 2616-2675 |
| | | | | | 2930-3027 |
| | | | | | 3226-3458 |
| | | | | | 3659-3796 |
| | | | | | 3840-3937 |
| | | | | | 4293-4451 |
| | | | | | 4551-4691 |
| | | | | | 4825-5290 |
| | | | | | 5640-6113 |
| | | | | | 6211-7445 |
| HPDDZ29 | 133 | 835822 | AC025574 | 721 | 1-812 |
| | | | | | 1090-1207 |
| | | | | | 1277-2724 |
| HPDDZ29 | 133 | 835822 | AC023500 | 722 | 1-812 |
| | | | | | 1090-1207 |
| | | | | | 1277-2532 |
| HPDDZ29 | 133 | 835822 | AC025574 | 723 | 1-98 |
| HPDDM95 | 135 | 796713 | AC022214 | 724 | 1-322 |
| | | | | | 604-1051 |
| | | | | | 1153-1591 |
| | | | | | 2214-2312 |
| | | | | | 3063-3511 |
| | | | | | 3974-4128 |
| | | | | | 5497-5649 |
| | | | | | 5745-6008 |
| | | | | | 6052-6674 |
| | | | | | 6880-7599 |
| | | | | | 8460-8567 |
| | | | | | 9812-10473 |
| | | | | | 12272-12433 |
| | | | | | 12476-12945 |
| | | | | | 12957-13298 |
| | | | | | 13400-13550 |
| | | | | | 14410-14875 |
| | | | | | 15064-15771 |
| | | | | | 16404-16472 |
| | | | | | 17041-17192 |
| | | | | | 17469-17618 |
| | | | | | 18318-21799 |
| HPDDM95 | 135 | 796713 | AC022214 | 725 | 1-232 |
| HPDDL52 | 137 | 863088 | AC005300 | 726 | 1-773 |
| | | | | | 1709-1890 |
| | | | | | 2836-3143 |
| | | | | | 6355-6532 |
| | | | | | 6807-7037 |
| | | | | | 9484-9873 |
| | | | | | 12068-12250 |
| | | | | | 14563-14741 |
| | | | | | 16820-17034 |
| | | | | | 17290-17405 |
| | | | | | 18316-18445 |
| | | | | | 18791-19509 |
| | | | | | 20090-20185 |
| | | | | | 20733-21099 |
| | | | | | 21680-21789 |
| | | | | | 22952-23191 |
| | | | | | 23246-23333 |
| | | | | | 23390-23488 |
| | | | | | 24700-24835 |
| | | | | | 25996-26172 |
| | | | | | 26523-26666 |
| | | | | | 26749-26876 |
| | | | | | 27153-27890 |
| | | | | | 28103-28310 |
| | | | | | 28549-30826 |
| HPDDL52 | 137 | 863088 | AC005300 | 727 | 1-335 |
| HPDDL28 | 138 | 685070 | AC013394 | 728 | 1-539 |
| | | | | | 811-1082 |
| | | | | | 1543 -2157 |
| | | | | | 2174-3283 |
| HPDDL28 | 138 | 685070 | AC013394 | 729 | 1-149 |
| HPDDI10 | 140 | 968674 | AC022082 | 730 | 1-456 |
| | | | | | 5135-5350 |
| | | | | | 6504-6553 |
| | | | | | 7343-7620 |
| HPDDI10 | 140 | 968674 | AC022082 | 731 | 1-209 |
| | | | | | 520-723 |
| | | | | | 2894-2983 |
| | | | | | 3078-3135 |
| HPDCA34 | 141 | 706837 | AC018369 | 732 | 1-431 |
| HIATK32 | 142 | 699711 | AL049820 | 733 | 1-947 |
| | | | | | 1163-1507 |
| | | | | | 1538-2109 |
| | | | | | 2556-3007 |
| HIATK32 | 142 | 699711 | AL049820 | 734 | 1-373 |
| HIATG92 | 143 | 584679 | AC005034 | 735 | 1-463 |
| HIATG92 | 143 | 584679 | AC005034 | 736 | 1-799 |
| | | | | | 1827-2540 |
| | | | | | 3205-3813 |
| HIATG92 | 143 | 584679 | AC005034 | 737 | 1-342 |
| | | | | | 522-852 |
| | | | | | 1924-2414 |
| | | | | | 4280-4413 |
| | | | | | 5298-5416 |
| | | | | | 6393-6746 |
| | | | | | 7458-8041 |
| | | | | | 8507-9137 |
| | | | | | 9646-9741 |
| | | | | | 11905-12587 |
| | | | | | 12937-13629 |
| | | | | | 13985-14129 |
| | | | | | 14313-14746 |
| | | | | | 16459-16700 |
| | | | | | 17136-17499 |
| | | | | | 18831-18957 |
| | | | | | 20215-20445 |
| | | | | | 20850-20972 |
| | | | | | 21706-22257 |
| | | | | | 22336-22887 |
| | | | | | 22956-23027 |
| HIATG60 | 144 | 739690 | AC027008 | 738 | 1-1760 |
| HIATG60 | 144 | 739690 | AL158207 | 739 | 1-2030 |
| | | | | | 2040-3799 |
| | | | | | 5224-5384 |
| | | | | | 5513-5543 |
| | | | | | 5993-6317 |
| | | | | | 6415-6592 |
| | | | | | 10250-10518 |
| | | | | | 11581-11853 |
| HIATG60 | 144 | 739690 | AC027008 | 740 | 1-245 |
| | | | | | 367-397 |
| HIATG60 | 144 | 739690 | AL158207 | 741 | 1-272 |
| HIATG59 | 145 | 739589 | AC024991 | 742 | 1-554 |
| HIATG59 | 145 | 739589 | AC024897 | 743 | 1-554 |
| HIATG59 | 145 | 739589 | AC025155 | 744 | 1-554 |
| HIASC20 | 147 | 502760 | AC024257 | 745 | 1-42 |
| | | | | | 2713-2921 |
| | | | | | 3485-3578 |
| HIASC20 | 147 | 502760 | AC024257 | 746 | 1-390 |
| HIASC20 | 147 | 502760 | AC024257 | 747 | 1-756 |
| HIABG69 | 150 | 793730 | AC015962 | 748 | 1-233 |
| | | | | | 310-395 |
| | | | | | 960-1280 |
| | | | | | 1557-2072 |
| | | | | | 2206-2494 |
| | | | | | 2569-2818 |
| | | | | | 2979-3097 |
| | | | | | 3255-3441 |
| | | | | | 3612-4965 |
| | | | | | 5079-5476 |
| HIABG69 | 150 | 793730 | AP002393 | 749 | 1-234 |
| | | | | | 311-396 |
| | | | | | 961-1281 |
| | | | | | 1558-2073 |
| | | | | | 2207-2495 |
| | | | | | 2570-2819 |
| | | | | | 2980-3098 |
| | | | | | 3256-3442 |
| | | | | | 3613-4965 |
| | | | | | 5079-5476 |
| HIABG69 | 150 | 793730 | AP002393 | 750 | 1-128 |
| HIABA07 | 152 | 894057 | AC021988 | 751 | 1-308 |
| | | | | | 319-474 |
| | | | | | 893-1116 |
| | | | | | 2059-2103 |
| | | | | | 2139-2443 |
| | | | | | 5539-5668 |
| HIABA07 | 152 | 894057 | AC011481 | 752 | 1-97 |
| | | | | | 289-338 |
| | | | | | 426-558 |
| | | | | | 1621-1746 |
| | | | | | 1781-1937 |
| | | | | | 2355-2578 |
| | | | | | 3279-3320 |
| | | | | | 4252-4961 |
| HIABA07 | 152 | 894057 | AF050154 | 753 | 1-97 |
| | | | | | 289-338 |
| | | | | | 426-558 |
| | | | | | 921-1051 |
| | | | | | 1053-1121 |
| | | | | | 1619-1744 |
| | | | | | 1779-1935 |
| | | | | | 2353-2576 |
| | | | | | 3277-3436 |
| | | | | | 4059-4957 |
| HIABA07 | 152 | 894057 | AC011481 | 754 | 1-662 |
| HIABA07 | 152 | 894057 | AF050154 | 755 | 1-138 |
| HIABA07 | 152 | 894057 | AC011481 | 756 | 1-138 |
| HIABA07 | 152 | 894057 | AF050154 | 757 | 1-662 |
| HIAAA75 | 153 | 504344 | AL008636 | 758 | 1-183 |
| HIAAA75 | 153 | 504344 | AL008636 | 759 | 1-282 |
| HEFMC68 | 155 | 752699 | AC015977 | 760 | 1-1845 |
| HEFMC68 | 155 | 752699 | AC074388 | 761 | 1-1846 |
| HEFMC68 | 155 | 752699 | AC015977 | 762 | 1-1660 |
| HATEG67 | 157 | 864454 | AC009420 | 763 | 1-1427 |
| HATEG67 | 157 | 864454 | AC025988 | 764 | 1-1427 |
| HATEG67 | 157 | 864454 | AC009420 | 765 | 1-258 |
| HATEG67 | 157 | 864454 | AC025988 | 766 | 1-257 |
| HATEC80 | 159 | 461733 | AC011781 | 767 | 1-1457 |
| HATEC80 | 159 | 461733 | AC013478 | 768 | 1-1457 |
| HATEC80 | 159 | 461733 | AC020719 | 769 | 1-1457 |
| HATEC80 | 159 | 461733 | AC011781 | 770 | 1-866 |
| HATEC80 | 159 | 461733 | AC013478 | 771 | 1-866 |
| HATEC80 | 159 | 461733 | AC020719 | 772 | 1-866 |
| HATEC07 | 160 | 960782 | AL139255 | 773 | 1-522 |
| | | | | | 543-3710 |
| | | | | | 3815-4380 |
| | | | | | 6322-6861 |
| | | | | | 7856-8858 |
| | | | | | 9117-9178 |
| | | | | | 9836-10133 |
| | | | | | 10333-10908 |
| | | | | | 10970-11423 |
| | | | | | 11514-12438 |
| HATEC07 | 160 | 960782 | AL365266 | 774 | 1-480 |
| | | | | | 633-1251 |
| | | | | | 1773-2283 |
| | | | | | 2674-3511 |
| | | | | | 3573-3935 |
| | | | | | 4016-6903 |
| | | | | | 7909-8049 |
| | | | | | 10282-13824 |
| | | | | | 13929-14494 |
| | | | | | 16442-16981 |
| | | | | | 17976-18978 |
| | | | | | 19237-19298 |
| | | | | | 19956-20134 |
| | | | | | 20454-21030 |
| | | | | | 21091-21544 |
| | | | | | 21635-22559 |
| | | | | | 23894-24358 |
| | | | | | 24857-25186 |
| | | | | | 26377-26517 |
| | | | | | 28168-28191 |
| | | | | | 28660-28974 |
| HATEC07 | 160 | 960782 | AC020781 | 775 | 1-62 |
| | | | | | 715-1024 |
| | | | | | 1218-1793 |
| | | | | | 1855-2308 |
| | | | | | 2399-3323 |
| HATEC07 | 160 | 960782 | AL365266 | 776 | 1-114 |
| HATEC07 | 160 | 960782 | AC020781 | 777 | 1-465 |
| HATEC07 | 160 | 960782 | AL139255 | 778 | 1-464 |
| HATEC07 | 160 | 960782 | AL365266 | 779 | 1-673 |
| HATEC07 | 160 | 960782 | AC020781 | 780 | 1-1003 |
| HATDY17 | 161 | 664314 | AC021562 | 781 | 1-906 |
| HATDY17 | 161 | 664314 | AC025260 | 782 | 1-906 |
| HATDY17 | 161 | 664314 | AC021562 | 783 | 1-303 |
| HATDY17 | 161 | 664314 | AC025260 | 784 | 1-1776 |
| | | | | | 2424-2575 |
| | | | | | 2740-3635 |
| HATDY17 | 161 | 664314 | AC021562 | 785 | 1-1493 |
| HATDY02 | 162 | 920529 | AL035400 | 786 | 1-515 |
| | | | | | 942-1341 |
| HATDY02 | 162 | 920529 | AL035400 | 787 | 1-425 |
| HATDY02 | 162 | 920529 | AL035400 | 788 | 1-345 |
| HATDX03 | 164 | 848537 | AC023027 | 789 | 1-465 |
| HATDX03 | 164 | 848537 | AC012366 | 790 | 1-157 |
| | | | | | 802-1380 |
| HATDX03 | 164 | 848537 | AC012366 | 791 | 1-451 |
| HATDU21 | 165 | 671175 | AC068248 | 792 | 1-439 |
| | | | | | 558-4751 |
| | | | | | 5064-5480 |
| | | | | | 5559-6923 |
| | | | | | 7010-7490 |
| | | | | | 8575-9162 |
| | | | | | 9676-10113 |
| HATDU21 | 165 | 671175 | AC073160 | 793 | 1-74 |
| | | | | | 867-1266 |
| | | | | | 1496-1934 |
| | | | | | 2053-6246 |
| | | | | | 6606-7022 |
| | | | | | 7101-8465 |
| | | | | | 8552-9032 |
| | | | | | 10117-10704 |
| | | | | | 11218-11655 |
| HATDJ67 | 169 | 575729 | AC016993 | 794 | 1-282 |
| | | | | | 834-1354 |
| HATDJ67 | 169 | 575729 | AC016993 | 795 | 1-480 |
| | | | | | 566-788 |
| HATDJ51 | 170 | 725807 | AC069368 | 796 | 1-1126 |
| | | | | | 1299-1336 |
| HATDG45 | 171 | 722088 | AC027727 | 797 | 1-1215 |
| HATDG45 | 171 | 722088 | AL109937 | 798 | 1-1179 |
| HATDG45 | 171 | 722088 | AC026900 | 799 | 1-1310 |
| HATDG45 | 171 | 722088 | AL359176 | 800 | 1-1635 |
| HATDG45 | 171 | 722088 | AC060753 | 801 | 1-3585 |
| | | | | | 3715-4305 |
| | | | | | 4546-5403 |
| HATDG45 | 171 | 722088 | AL356004 | 802 | 1-1636 |
| HATDG45 | 171 | 722088 | AC027209 | 803 | 1-1301 |
| HATDG45 | 171 | 722088 | AL049742 | 804 | 1-1857 |
| | | | | | 1863-2229 |
| | | | | | 2699-5270 |
| | | | | | 5474-7109 |
| HATDG45 | 171 | 722088 | AL359176 | 805 | 1-2152 |
| HATDG45 | 171 | 722088 | AC060753 | 806 | 1-292 |
| HATDG45 | 171 | 722088 | AC027727 | 807 | 1-711 |
| HATDG45 | 171 | 722088 | AC026900 | 808 | 1-2078 |
| | | | | | 2378-2968 |
| | | | | | 3217-4094 |
| | | | | | 4180-4659 |
| | | | | | 4664-6770 |
| | | | | | 6814-7224 |
| HATDG45 | 171 | 722088 | AL359176 | 809 | 1-1407 |
| HATDG45 | 171 | 722088 | AL356004 | 810 | 1-761 |
| | | | | | 796-1915 |
| | | | | | 2046-2636 |
| | | | | | 2885-3700 |
| | | | | | 3848-6031 |
| | | | | | 6105-6435 |
| | | | | | 6750-7508 |
| | | | | | 8743-9098 |
| HATDG45 | 171 | 722088 | AC027209 | 811 | 1-2282 |
| | | | | | 2412-3002 |
| | | | | | 3469-4126 |
| | | | | | 4211-6401 |
| | | | | | 6472-6802 |
| | | | | | 6854-7412 |
| | | | | | 7505-7877 |
| | | | | | 8817-9469 |
| | | | | | 9531-10355 |
| | | | | | 11182-11518 |
| | | | | | 11841-12049 |
| | | | | | 12639-12673 |
| | | | | | 13026-13612 |
| | | | | | 13639-15711 |
| | | | | | 15745-16135 |
| | | | | | 16215-16907 |
| | | | | | 17307-17773 |
| HATDG45 | 171 | 722088 | AL049742 | 812 | 1-1554 |
| | | | | | 1998-3175 |
| HATDG45 | 171 | 722088 | AL049742 | 813 | 1-762 |
| | | | | | 797-1916 |
| | | | | | 2047-2637 |
| | | | | | 2886-3701 |
| | | | | | 3849-4328 |
| | | | | | 4614-5981 |
| | | | | | 6055-6385 |
| | | | | | 6700-7458 |
| | | | | | 8693-9048 |
| HATCV56 | 175 | 573558 | AC016506 | 814 | 1-163 |
| | | | | | 1732-1785 |
| | | | | | 5798-5895 |
| | | | | | 7888-8115 |
| HATCV56 | 175 | 573558 | AC012533 | 815 | 1-163 |
| | | | | | 1732-1785 |
| | | | | | 5799-5896 |
| | | | | | 7889-8116 |
| HATCV56 | 175 | 573558 | AC016506 | 816 | 1-466 |
| | | | | | 503-677 |
| | | | | | 2329-2836 |
| HATCV56 | 175 | 573558 | AC012533 | 817 | 1-512 |
| HATCV56 | 175 | 573558 | AC016506 | 818 | 1-512 |
| | | | | | 656-945 |
| | | | | | 1140-1502 |
| | | | | | 1774-2510 |
| | | | | | 4599-4658 |
| | | | | | 5247-5647 |
| | | | | | 5728-6143 |
| | | | | | 6818-7361 |
| | | | | | 8187-10937 |
| HATCV56 | 175 | 573558 | AC012533 | 819 | 1-508 |
| HATCS68 | 177 | 573572 | AL389882 | 820 | 1-457 |
| HATCS68 | 177 | 573572 | AL354740 | 821 | 1-157 |
| | | | | | 653-927 |
| | | | | | 2071-2185 |
| HATCS68 | 177 | 573572 | AC025405 | 822 | 1-275 |
| HATCS68 | 177 | 573572 | AL354740 | 823 | 1-626 |
| HATCS68 | 177 | 573572 | AC025405 | 824 | 1-115 |
| HATCS68 | 177 | 573572 | AL354740 | 825 | 1-219 |
| HATCS57 | 178 | 573530 | AC009761 | 826 | 1-1487 |
| HATCR61 | 179 | 576886 | AC010300 | 827 | 1-139 |
| | | | | | 1590-1896 |
| | | | | | 3289-3372 |
| | | | | | 3393-4930 |
| | | | | | 5060-5698 |
| HATCR61 | 179 | 576886 | AC012431 | 828 | 1-139 |
| | | | | | 1589-1895 |
| | | | | | 3288-3371 |
| | | | | | 3392-4935 |
| | | | | | 5065-5703 |
| HATCR10 | 180 | 848579 | AC009783 | 829 | 1-3878 |
| HATCR10 | 180 | 848579 | AC008264 | 830 | 1-3878 |
| HATCR10 | 180 | 848579 | AC009783 | 831 | 1-510 |
| HATCR10 | 180 | 848579 | AC009783 | 832 | 1-4398 |
| HATCR10 | 180 | 848579 | AC008264 | 833 | 1-510 |
| HATCR10 | 180 | 848579 | AC008264 | 834 | 1-2211 |
| HATCQ89 | 181 | 786007 | AC008854 | 835 | 1-610 |
| | | | | | 649-1382 |
| | | | | | 1578-2021 |
| HATCQ89 | 181 | 786007 | AC008854 | 836 | 1-956 |
| HATCQ89 | 181 | 786007 | AC008854 | 837 | 1-427 |
| HATCP45 | 182 | 722080 | AC078920 | 838 | 1-685 |
| HATCP45 | 182 | 722080 | AC078920 | 839 | 1-425 |
| HATCO92 | 183 | 790644 | AC074005 | 840 | 1-761 |
| | | | | | 1083-2071 |
| | | | | | 2884-2990 |
| | | | | | 3012-3425 |
| | | | | | 3447-6065 |
| HATCK18 | 185 | 828685 | AF216669 | 841 | 1-166 |
| | | | | | 1157-1736 |
| | | | | | 1856-2655 |
| | | | | | 2839-3324 |
| | | | | | 3585-4177 |
| | | | | | 4441-5747 |
| | | | | | 5787-6175 |
| | | | | | 6245-6613 |
| | | | | | 7410-7591 |
| HATCK18 | 185 | 828685 | AF216669 | 842 | 1-329 |
| HATCI79 | 186 | 781788 | AC007938 | 843 | 1-84 |
| | | | | | 669-941 |
| | | | | | 3546-4121 |
| | | | | | 5599-5979 |
| | | | | | 6030-6163 |
| | | | | | 6276-6616 |
| | | | | | 6737-6877 |
| | | | | | 7016-7813 |
| | | | | | 7978-8418 |
| | | | | | 8477-8846 |
| | | | | | 9042-9130 |
| | | | | | 9200-9651 |
| | | | | | 9659-10170 |
| | | | | | 10225-10587 |
| | | | | | 10847-12498 |
| | | | | | 12532-12596 |
| | | | | | 13334-15862 |
| | | | | | 15870-15973 |
| | | | | | 16199-18678 |
| HATCI79 | 186 | 781788 | AC007938 | 844 | 1-699 |
| | | | | | 1061-1461 |
| | | | | | 1926-2314 |
| | | | | | 3189-3298 |
| HATCI79 | 186 | 781788 | AC007938 | 845 | 1-906 |
| HATCG82 | 187 | 529945 | AP001812 | 846 | 1-778 |
| HATCG82 | 187 | 529945 | AP000759 | 847 | 1-778 |
| HATCG82 | 187 | 529945 | AP001812 | 848 | 1-745 |
| HATCG82 | 187 | 529945 | AP000759 | 849 | 1-745 |
| HATCA28 | 188 | 848588 | AC026624 | 850 | 1-387 |
| HATCA28 | 188 | 848588 | AC073419 | 851 | 1-904 |
| HATCA28 | 188 | 848588 | AC027807 | 852 | 1-904 |
| HATCA28 | 188 | 848588 | AC027605 | 853 | 1-904 |
| HATCA28 | 188 | 848588 | AC027807 | 854 | 1-387 |
| HATCA28 | 188 | 848588 | AC073419 | 855 | 1-387 |
| HATCA28 | 188 | 848588 | AC027605 | 856 | 1-387 |
| HATBS24 | 190 | 678242 | AL034430 | 857 | 1-181 |
| HATBS24 | 190 | 678242 | AL034430 | 858 | 1-389 |
| HATBO95 | 191 | 796708 | AC048332 | 859 | 1-844 |
| HATBO95 | 191 | 796708 | AC009811 | 860 | 1-844 |
| HATBM50 | 192 | 724746 | AC007637 | 861 | 1-141 |
| | | | | | 852-2843 |
| HATBM50 | 192 | 724746 | AC007637 | 862 | 1-180 |
| HATBK63 | 193 | 864526 | AC067895 | 863 | 1-624 |
| HATBK63 | 193 | 864526 | AC067895 | 864 | 1-363 |
| HATBG59 | 195 | 504646 | AC020566 | 865 | 1-1172 |
| HATBG59 | 195 | 504646 | AC016901 | 866 | 1-2243 |
| HATBG59 | 195 | 504646 | AC016594 | 867 | 1-2242 |
| | | | | | 2272-2772 |
| | | | | | 2916-2968 |
| | | | | | 3023-3345 |
| | | | | | 5311-5509 |
| | | | | | 6041-7250 |
| | | | | | 7791-8357 |
| | | | | | 8562-9218 |
| | | | | | 10007-10164 |
| | | | | | 10254-10445 |
| | | | | | 10574-11006 |
| | | | | | 11264-11628 |
| | | | | | 12012-12634 |
| | | | | | 15609-15695 |
| | | | | | 18389-18474 |
| | | | | | 19950-20006 |
| | | | | | 20429-20530 |
| HATBG59 | 195 | 504646 | AC020566 | 868 | 1-1092 |
| HATBG59 | 195 | 504646 | AC016901 | 869 | 1-483 |
| HATBG59 | 195 | 504646 | AC016901 | 870 | 1-1045 |
| | | | | | 1446-2537 |
| HATBG59 | 195 | 504646 | AC016594 | 871 | 1-204 |
| HATBG59 | 195 | 504646 | AC016594 | 872 | 1-1045 |
| | | | | | 1446-2538 |
| HATBB46 | 197 | 504599 | AC016629 | 873 | 1-127 |
| | | | | | 175-781 |
| | | | | | 1159-1817 |
| | | | | | 1900-2503 |
| HATBB46 | 197 | 504599 | AC016629 | 874 | 1-576 |
| HATBB46 | 197 | 504599 | AC016629 | 875 | 1-318 |
| HATAE60 | 200 | 928455 | AC069536 | 876 | 1-621 |
| HATAE60 | 200 | 928455 | AC069536 | 877 | 1-509 |
| HATAA80 | 202 | 781648 | AL356599 | 878 | 1-176 |
| | | | | | 1255-1676 |
| | | | | | 1733-2105 |
| | | | | | 2338-2700 |
| HATAA80 | 202 | 781648 | AL356599 | 879 | 1-98 |

[0063] Table 1B summarizes additional polynucleotides encompassed by the invention (including cDNA clones related to the sequences (Clone ID NO:Z), contig sequences (contig identifier (Contig ID:) contig nucleotide sequence identifiers (SEQ ID NO:X)), and genomic sequences (SEQ ID NO:B). The first column provides a unique clone identifier, “Clone ID NO:Z”, for a cDNA clone related to each contig sequence. The second column provides the sequence identifier, “SEQ ID NO:X”, for each contig sequence. The third column provides a unique contig identifier, “Contig ID:” for each contig sequence. The fourth column, provides a BAC identifier “BAC ID NO:A” for the BAC clone referenced in the corresponding row of the table. The fifth column provides the nucleotide sequence identifier, “SEQ ID NO:B” for a fragment of the BAC clone identified in column four of the corresponding row of the table. The sixth column, “Exon From-To”, provides the location (i.e., nucleotide position numbers) within the polynucleotide sequence of SEQ ID NO:B which delineate certain polynucleotides of the invention that are also exemplary members of polynucleotide sequences that encode polypeptides of the invention (e.g., polypeptides containing amino acid sequences encoded by the polynucleotide sequences delineated in column six, and fragments and variants thereof).

TABLE 2

| | | SEQ | | | | Score/ | | |
|---|---|---|---|---|---|---|---|---|
| Clone ID | Contig | ID | Analysis | | PFam/NR Accession | Percent | NT | |
| NO:Z | ID: | NO:X | Method | PFam/NR Description | Number | Identity | From | NT To |
| HATAA38 | 963315 | 11 | blastx.2 | (AL137438) hypothetical | emb\|CAB70736.1\| | 86% | 73 | 225 |
| | | | | protein [Homo sapiens] | | | | |
| HATBS54 | 622676 | 21 | blastx.2 | (AF044959) | gb\|AAC27799.1\| | 93% | 173 | 271 |
| | | | | NADH: ubiquinone | | 100% | 30 | 104 |
| | | | | oxidoreductase NDUFS6 | | 87% | 13 | 36 |
| | | | | subunit [Homo sapiens] | | | | |
| HATDD31 | 698297 | 33 | HMMER | PFAM: Zinc-binding | PF00099 | 2.75 | 32 | 58 |
| | | | 1.8 | metalloprotease domain | | | | |
| | | | blastx.2 | (AF118086) PRO1992 | gb\|AAF22030.1\|AF1 | 66% | 346 | 221 |
| | | | | [Homo sapiens] | 18094_25 | | | |
| HEFMB58 | 665206 | 42 | blastx.2 | (AF118082) PRO1902 | gb\|AAF22026.1\|AF1 | 57% | 193 | 327 |
| | | | | [Homo sapiens] | 18094_21 | 43% | 315 | 425 |
| HEFME17 | 662268 | 43 | blastx.2 | (AK000385) unnamed | dbj\|BAA91131.1\| | 72% | 145 | 5 |
| | | | | protein product [Homo | | 50% | 234 | 145 |
| | | | | sapiens] | | | | |
| HIABI65 | 753952 | 45 | blastx.2 | (AK000385)unnamed | dbj\|BAA91131.1\| | 58% | 6 | 218 |
| | | | | protein product [Homo | | | | |
| | | | | sapiens] | | | | |
| HPTAC80 | 671552 | 53 | blastx.2 | (AF110774)adrenal gland | gb\|AAF14857.1\|AF1 | 100% | 1 | 231 |
| | | | | protein AD-001 [Homo | 10774_1 | | | |
| | | | | sapiens] | | | | |
| HPTRB72 | 973817 | 58 | HMMER | PFAM: Lipoate-protein | PF02111 | 89.6 | 104 | 379 |
| | | | 2.1.1 | ligase B | | | | |
| | | | blastx.2 | (AC002376) Contains | gb\|AAB80636.1\| | 39% | 41 | 379 |
| | | | | similarity to | | 35% | 360 | 518 |
| | | | | Mycobacterium LIPB | | | | |
| | | | | gene (gb\|Q104041). | | | | |
| | | | | [Arabidopsis thaliana] | | | | |
| HPTRL46 | 575992 | 67 | blastx.2 | (AF010404) ALR [Homo | gb\|AAC51735.1\| | 87% | 180 | 7 |
| | | | | sapiens] | | | | |
| HPTRS61 | 841701 | 72 | blastx.2 | (AL021453) dJ821D11.3 | emb\|CAA16280.1\| | 82% | 109 | 327 |
| | | | | (PUTATIVE protein) | | | | |
| | | | | [Homo sapiens] | | | | |
| HPTRS63 | 675992 | 73 | blastx.2 | guanine nucleotide | gb\|AAA41259.1\| | 75% | 190 | 98 |
| | | | | dissociation stimulator | | 50% | 285 | 244 |
| | | | | [Rattus rattus] | | 61% | 229 | 191 |
| HPTRX19 | 975341 | 76 | blastx.2 | IDN4-GGTR14 | sp\|Q9Y6Y5\|Q9Y6Y5 | 90% | 11 | 100 |
| | | | | PROTEIN. | | 37% | 100 | 177 |
| HPTTE22 | 968632 | 79 | HMMER | PFAM: Zinc-binding | PF00099 | 2.42 | 132 | 176 |
| | | | 1.8 | metalloprotease domain | | | | |
| HPTTL50 | 693555 | 81 | blastx.2 | (AF090930) PRO0478 | gb\|AAF24045.1\|AF0 | 75% | 136 | 231 |
| | | | | [Homo sapiens] | 90930_1 | | | |
| HPTTU76 | 771294 | 84 | blastx.2 | (AJ012611) SIX3 protein | emb\|CAB42539.1\| | 62% | 9 | 167 |
| | | | | [Homo sapiens] | | | | |
| HPTVC63 | 576794 | 86 | blastx.2 | (AF090930) PRO0478 | gb\|AAF24045.1\|AF0 | 72% | 311 | 418 |
| | | | | [Homo sapiens] | 90930_1 | | | |
| HPTVF33 | 929663 | 88 | blastx.2 | (AP000559) ESTs | dbj\|BAA84809.1\| | 53% | 10 | 201 |
| | | | | AU078277(S1084),AU07 | | | | |
| | | | | 8273(S13585), 11 [Oryza | | | | |
| | | | | sativa] | | | | |
| HPTWA13 | 975009 | 96 | blastx.2 | elastin like protein | emb\|CAA59990.1\| | 100% | 37 | 108 |
| | | | | [Drosophila melanogaster] | | 40% | 426 | 521 |
| HPTWG27 | 506242 | 98 | blastx.2 | (AF096168) LHX3 | gb\|AAF17291.1\| | 96% | 1 | 99 |
| | | | | protein [Homo sapiens] | | | | |
| HPTXE41 | 711991 | 99 | blastx.2 | (AC007193) Putative | gb\|AAD22668.1\|AC0 | 83% | 209 | 370 |
| | | | | homolog of hypoxia | 07193_2 | | | |
| | | | | inducible factor three | | | | |
| | | | | alpha [Homo sapiens] | | | | |
| HPTXN72 | 761488 | 100 | blastx.2 | (AB015231) stretch- | dbj\|BAA34942.2\| | 81% | 62 | 220 |
| | | | | inhibitable nonselective | | 74% | 3 | 83 |
| | | | | channel (SIC) [Rattus | | | | |
| | | | | norvegicus] | | | | |
| HTNBO21 | 870052 | 111 | blastx.2 | (AF010144) neuronal | gb\|AAC08737.1\| | 56% | 729 | 902 |
| | | | | thread protein AD7c-NTP | | 58% | 729 | 863 |
| | | | | [Homo sapiens] | | 66% | 18 | 122 |
| | | | | | | 87% | 835 | 882 |
| | | | | | | 47% | 15 | 140 |
| | | | | | | 48% | 281 | 400 |
| | | | | | | 36% | 320 | 586 |
| | | | | | | 31% | 290 | 505 |
| | | | | | | 54% | 50 | 121 |
| | | | | | | 32% | 271 | 486 |
| | | | | | | 70% | 75 | 125 |
| | | | | | | 56% | 84 | 131 |
| HTNBN03 | 960877 | 112 | blastx.2 | (AK000385) unnamed | dbj\|BAA91131.1\| | 79% | 577 | 434 |
| | | | | protein product [Homo | | 77% | 444 | 310 |
| | | | | sapiens] | | | | |
| HTNBE16 | 667653 | 113 | blastx.2 | alternatively spliced | gb\|AAB49034.1\| | 75% | 157 | 2 |
| | | | | product using exon 13A | | | | |
| | | | | [Homo sapiens] | | | | |
| HPTTK64 | 893859 | 126 | HMMER | PFAM: Zona pellucida- | PF00100 | 40.4 | 94 | 249 |
| | | | 2.1.1 | like domain | | | | |
| | | | blastx.2 | zona pellucida [Mus | gb\|AAB60507.1\| | 46% | 22 | 513 |
| | | | | musculus] | | | | |
| HPTRG17 | 867379 | 130 | blastx.2 | (AK002129) unnamed | dbj\|BAA92096.1\| | 60% | 93 | 257 |
| | | | | protein product [Homo | | | | |
| | | | | sapiens] | | | | |
| HPDDI10 | 968674 | 140 | blastx.2 | (AF039702) antigen NY- | gb\|AAC18051.1\| | 79% | 11 | 385 |
| | | | | CO-43 [Homo sapiens] | | | | |
| HIATG92 | 584679 | 143 | blastx.2 | (AK002129) unnamed | dbj\|BAA92096.1\| | 66% | 190 | 324 |
| | | | | protein product [Homo | | | | |
| | | | | sapiens] | | | | |
| HIABG69 | 793730 | 150 | blastx.2 | (AF149758) CpG binding | gb\|AAF37799.1\|AF1 | 98% | 235 | 387 |
| | | | | protein [Homo sapiens] | 49758_1 | 64% | 619 | 837 |
| | | | | | | 78% | 20 | 97 |
| | | | | | | 68% | 3 | 50 |
| | | | | | | 46% | 752 | 835 |
| HIABA07 | 894057 | 152 | blastx.2 | (AK000241) unnamed | dbj\|BAA91028.1\| | 84% | 7 | 105 |
| | | | | protein product [Homo | | | | |
| | | | | sapiens] | | | | |
| HIAAA49 | 723338 | 154 | blastx.2 | (AF090930) PRO0478 | gb\|AAF24045.1\|AF0 | 81% | 379 | 489 |
| | | | | [Homo sapiens] | 90930_1 | | | |
| HATEE95 | 908958 | 158 | HMMER | PFAM: Zinc finger, C2H2 | PF00096 | 70.2 | 237 | 305 |
| | | | 2.1.1 | type | | | | |
| | | | blastx.2 | zinc finger protein [Homo | gb\|AAC99849.1\| | 98% | 3 | 257 |
| | | | | sapiens] | | | | |
| HATCV67 | 573565 | 174 | blastx.2 | (AK000496) unnamed | dbj\|BAA91205.1\| | 50% | 380 | 267 |
| | | | | protein product [Homo | | 61% | 207 | 130 |
| | | | | sapiens] | | 70% | 268 | 209 |
| | | | | | | 81% | 432 | 385 |
| HATCV56 | 573558 | 175 | blastx.2 | (AK000680) unnamed | dbj\|BAA91321.1\| | 98% | 1 | 324 |
| | | | | protein product [Homo | | | | |
| | | | | sapiens] | | | | |
| HATCK18 | 828685 | 185 | blastx.2 | 100 kDa protein [Rattus | emb\|CAA45756.1\| | 82% | 52 | 174 |
| | | | | norvegicus] | | | | |
| HATAE60 | 928455 | 200 | HMMER | PFAM: Leucine Rich | PF00560 | 56.2 | 146 | 217 |
| | | | 2.1.1 | Repeat | | | | |
| | | | blastx.2 | acid labile subunit [Mus | gb\|AAB17270.1\| | 31% | 56 | 499 |
| | | | | musculus] | | 40% | 6 | 71 |
| | | | | | | 50% | 6 | 71 |
| | | | | | | 52% | 6 | 62 |
| HATAC82 | 958793 | 201 | blastx.2 | (AF041429) pRGR1 | gb\|AAF18564.1\| | 94% | 131 | 289 |
| | | | | [Homo sapiens] | | 95% | 48 | 110 |
| | | | | | | 100% | 1 | 48 |

[0064] Table 2 further characterizes certain encoded polypeptides of the invention, by providing the results of comparisons to protein and protein family databases. The first column provides a unique clone identifier, “Clone ID NO:”, corresponding to a cDNA clone disclosed in Table 1A. The second column provides the unique contig indentifier, “Contig ID:” which allows correlation with the information in Table. 1A. The third column provides the sequence identifier, “SEQ ID NO:X”, for the contig polynucleotide sequences. The fourth column provides the analysis method by which the homology/identity disclosed in the row was determined. The fifth column provides a description of PFam/NR hits having significant matches identified by each analysis. Column six provides the accession number of the PFam/NR hit disclosed in the fifth column. Column seven, “Score/Percent Identity”, provides a quality score or the percent identity, of the hit disclosed in column five. Comparisons were made between polypeptides encoded by polynucleotides of the invention and a non-redundant protein database (herein referred to as “NR”), or a database of protein families (herein referred to as “PFam”), as described below.

[0065] The NR database, which comprises the NBRF PIR database, the NCBI GenPept database, and the SIB SwissProt and TrEMBL databases, was made non-redundant using the computer program nrdb2 (Warren Gish, Washington University in Saint Louis). Each of the polynucleotides shown in Table 1A, column 3 (e.g., SEQ ID NO:X or the ‘Query’ sequence) was used to search against the NR database. The computer program BLASTX was used to compare a 6-frame translation of the Query sequence to the NR database (for information about the BLASTX algorithm please see Altshul et al., J. Mol. Biol. 215:403-410 (1990), and Gish et al., Nat. Genet. 3:266-272 (1993)). A description of the sequence that is most similar to the Query sequence (the highest scoring ‘Subject’) is shown in column five of Table 2 and the database accession number for that sequence is provided in column six. The highest scoring ‘Subject’ is reported in Table 2 if (a) the estimated probability that the match occurred by chance alone is less than 1.0e-07, and (b) the match was not to a known repetitive element. BLASTX returns alignments of short polypeptide segments of the Query and Subject sequences which share a high degree of similarity; these segments are known as High-Scoring Segment Pairs or HSPs. Table 2 reports the degree of similarity between the Query and the Subject for each HSP as a percent identity in Column 7. The percent identity is determined by dividing the number of exact matches between the two aligned sequences in the HSP, dividing by the number of Query amino acids in the HSP and multiplying by 100. The polynucleotides of SEQ ID NO:X which encode the polypeptide sequence that generates an HSP are delineated by columns 8 and 9 of Table 2.

[0066] The PFam database, PFam version 5.2, (Sonnhammer et al., Nucl. Acids Res., 26:320-322, (1998)) consists of a series of multiple sequence alignments; one alignment for each protein family. Each multiple sequence alignment is converted into a probability model called a Hidden Markov Model, or HMM, that represents the position-specific variation among the sequences that make up the multiple sequence alignment (see, e.g., R. Durbin et al., Biological sequence analysis: probabilistic models of proteins and nucleic acids, Cambridge University Press, 1998 for the theory of HMMs). The program HMMER version 1.8 (Sean Eddy, Washington University in Saint Louis) was used to compare the predicted protein sequence for each Query sequence (SEQ ID NO:Y in Table 1A) to each of the HMMs derived from PFam version 5.2. A HMM derived from PFam version 5.2 was said to be a significant match to a polypeptide of the invention if the score returned by HMMER 1.8 was greater than 0.8 times the HMMER 1.8 score obtained with the most distantly related known member of that protein family. The description of the PFam family which shares a significant match with a polypeptide of the invention is listed in column 5 of Table 2, and the database accession number of the PFam hit is provided in column 6. Column 7 provides the score returned by HMMER version 1.8 for the alignment. Columns 8 and 9 delineate the polynucleotides of SEQ ID NO:X which encode the polypeptide sequence which shows a significant match to a PFam protein family.

[0067] As mentioned, columns 8 and 9 in Table 2, “NT From” and “NT To”, delineate the polynucleotides of “SEQ ID NO:X” that encode a polypeptide having a significant match to the PFam/NR database as disclosed in the fifth column of Table 2. In one embodiment, the invention provides a protein comprising, or alternatively consisting of, a polypeptide encoded by the polynucleotides of SEQ ID NO:X delineated in columns 8 and 9 of Table 2. Also provided are polynucleotides encoding such proteins, and the complementary strand thereto.

[0068] The nucleotide sequence SEQ ID NO:X and the translated SEQ ID NO:Y are sufficiently accurate and otherwise suitable for a variety of uses well known in the art and described further below. For instance, the nucleotide sequences of SEQ ID NO:X are useful for designing nucleic acid hybridization probes that will detect nucleic acid sequences contained in SEQ ID NO:X or the cDNA contained in Clone ID NO:Z. These probes will also hybridize to nucleic acid molecules in biological samples, thereby enabling immediate applications in chromosome mapping, linkage analysis, tissue identification and/or typing, and a variety of forensic and diagnostic methods of the invention. Similarly, polypeptides identified from SEQ ID NO:Y may be used to generate antibodies which bind specifically to these polypeptides, or fragments thereof, and/or to the polypeptides encoded by the cDNA clones identified in, for example, Table 1A.

[0069] Nevertheless, DNA sequences generated by sequencing reactions can contain sequencing errors. The errors exist as misidentified nucleotides, or as insertions or deletions of nucleotides in the generated DNA sequence. The erroneously inserted or deleted nucleotides cause frame shifts in the reading frames of the predicted amino acid sequence. In these cases, the predicted amino acid sequence diverges from the actual amino acid sequence, even though the generated DNA sequence may be greater than 99.9% identical to the actual DNA sequence (for example, one base insertion or deletion in an open reading frame of over 1000 bases).

[0070] Accordingly, for those applications requiring precision in the nucleotide sequence or the amino acid sequence, the present invention provides not only the generated nucleotide sequence identified as SEQ ID NO:X, and a predicted translated amino acid sequence identified as SEQ ID NO:Y, but also a sample of plasmid DNA containing cDNA Clone ID NO:Z (deposited with the ATCC on Oct. 5, 2000, and receiving ATCC designation numbers PTA 2574 and PTA 2575; deposited with the ATCC on Jan. 5, 2001, having the depositor reference numbers TS-1, TS-2, AC-1, and AC-2; and/or as set forth, for example, in Table 1A, 6 and 7). The nucleotide sequence of each deposited clone can readily be determined by sequencing the deposited clone in accordance with known methods. Further, techniques known in the art can be used to verify the nucleotide sequences of SEQ ID NO:X.

[0071] The predicted amino acid sequence can then be verified from such deposits. Moreover, the amino acid sequence of the protein encoded by a particular clone can also be directly determined by peptide sequencing or by expressing the protein in a suitable host cell containing the deposited human cDNA, collecting the protein, and determining its sequence.

[0072] RACE Protocol for Recovery of Full-Length Genes

[0073] Partial cDNA clones can be made full-length by utilizing the rapid amplification of cDNA ends (RACE) procedure described in Frohman, M. A., et al., Proc. Nat'l. Acad. Sci. USA, 85:8998-9002 (1988). A cDNA clone missing either the 5′ or 3′ end can be reconstructed to include the absent base pairs extending to the translational start or stop codon, respectively. In some cases, cDNAs are missing the start codon of translation. The following briefly describes a modification of this original 5′ RACE procedure. Poly A+ or total RNA is reverse transcribed with Superscript II (Gibco/BRL) and an antisense or complementary primer specific to the cDNA sequence. The primer is removed from the reaction with a Microcon Concentrator (Amicon). The first-strand cDNA is then tailed with dATP and terminal deoxynucleotide transferase (Gibco/BRL). Thus, an anchor sequence is produced which is needed for PCR amplification. The second strand is synthesized from the dA-tail in PCR buffer, Taq DNA polymerase (Perkin-Elmer Cetus), an oligo-dT primer containing three adjacent restriction sites (XhoI, SalI and Claf) at the 5′ end and a primer containing just these restriction sites. This double-stranded cDNA is PCR amplified for 40 cycles' with the same primers as well as a nested cDNA-specific antisense primer. The PCR products are size-separated on an ethidium bromide-agarose gel and the region of gel containing cDNA products the predicted size of missing protein-coding DNA is removed. cDNA is purified from the agarose with the Magic PCR Prep kit (Promega), restriction digested with XhoI or SalI, and ligated to a plasmid such as pBluescript SKII (Stratagene) at XhoI and EcoRV sites. This DNA is transformed into bacteria and the plasmid clones sequenced to identify the correct protein-coding inserts. Correct 5′ ends are confirmed by comparing this sequence with the putatively identified homologue and overlap with the partial cDNA clone. Similar methods known in the art and/or commercial kits are used to amplify and recover 3 ends.

[0074] Several quality-controlled kits are commercially available for purchase. Similar reagents and methods to those above are supplied in kit form from Gibco/BRL for both 5′ and 3′ RACE for recovery of full length genes. A second kit is available from Clontech which is a modification of a related technique, SLIC (single-stranded ligation to single-stranded cDNA), developed by Dumas et al., Nucleic Acids Res., 19:5227-32 (1991). The major differences in procedure are that the RNA is alkaline hydrolyzed after reverse transcription and RNA ligase is used to join a restriction site-containing anchor primer to the first-strand cDNA. This obviates the necessity for the dA-tailing reaction which results in a polyT stretch that is difficult to sequence past.

[0075] An alternative to generating 5′ or 3′ cDNA from RNA is to use cDNA library double-stranded DNA. An asymmetric PCR-amplified antisense cDNA strand is synthesized with an antisense cDNA-specific primer and a plasmid-anchored primer. These primers are removed and a symmetric PCR reaction is performed with a nested cDNA-specific antisense primer and the plasmid-anchored primer.

[0076] RNA Ligase Protocol for Generating the 5′ or 3′ End Sequences to Obtain Full Length Genes

[0077] Once a gene of interest is identified, several methods are available for the identification of the 5′ or 3′ portions of the gene which may not be present in the original cDNA plasmid. These methods include, but are not limited to, filter probing, clone enrichment using specific probes and protocols similar and identical to 5′ and 3′ RACE. While the full length gene may be present in the library and can be identified by probing, a useful method for generating the 5′ or 3′ end is to use the existing sequence information from the original cDNA to generate the missing information. A method similar to 5′ RACE is available for generating the missing 5′ end of a desired full-length gene. (This method was published by Fromont-Racine et al., Nucleic Acids Res., 21(7):1683-1684 (1993)). Briefly, a specific RNA oligonucleotide is ligated to the 5′ ends of a population of RNA presumably containing full-length gene RNA transcript. A primer set containing a primer specific to the ligated RNA oligonucleotide and a primer specific to a known sequence of the gene of interest, is used to PCR amplify the 5′ portion of the desired full length gene which may then be sequenced and used to generate the full length gene. This method starts with total RNA isolated from the desired source, poly A RNA may be used but is not a prerequisite for this procedure. The RNA preparation may then be treated with phosphatase if necessary to eliminate 5′ phosphate groups on degraded or damaged RNA which may interfere with the later RNA ligase step. The phosphatase, if used, is then inactivated and the RNA is treated with tobacco acid pyrophosphatase in order to remove the cap structure present at the 5′ ends of messenger RNAs. This reaction leaves a 5′ phosphate group at the 5′ end of the cap cleaved RNA which can then be ligated to an RNA oligonucleotide using T4 RNA ligase. This modified RNA preparation can then be used as a template for first strand cDNA synthesis using a gene specific oligonucleotide. The first strand synthesis reaction can then be used as a template for PCR amplification of the desired 5′ end using a primer specific to the ligated RNA oligonucleotide and a primer specific to the known sequence of the endocrine antigen of interest. The resultant product is then sequenced and analyzed to confirm that the 5′ end sequence belongs to the relevant endocrine antigen.

[0078] The present invention also relates to vectors or plasmids which include such DNA sequences, as well as the use of the DNA sequences. The material deposited with the ATCC (deposited with the ATCC on Oct. 5, 2000, and receiving ATCC designation numbers PTA 2574 and PTA 2575; deposited with the ATCC on Jan. 5, 2001, having the depositor reference numbers TS-1, TS-2, AC-1, and AC-2; and/or as set forth, for example, in Table 1A, 6 and 7) is a mixture of cDNA clones derived from a variety of human tissue and cloned in either a plasmid vector or a phage vector, as shown, for example, in Table 7. These deposits are referred to as “the deposits” herein. The tissues from which some of the clones were derived are listed in Table 7, and the vector in which the corresponding cDNA is contained is also indicated in Table 7. The deposited material includes cDNA clones corresponding to SEQ ID NO:X described, for example, in Table 1A (Clone ID NO:Z). A clone which is isolatable from the ATCC Deposits by use of a sequence listed as SEQ ID NO:X, may include the entire coding region of a human gene or in other cases such clone may include a substantial portion of the coding region of a human gene. Furthermore, although the sequence listing may in some instances list only a portion of the DNA sequence in a clone included in the ATCC Deposits, it is well within the ability of one skilled in the art to sequence the DNA included in a clone contained in the ATCC Deposits by use of a sequence (or portion thereot) described in, for example Tables 1A or 2 by procedures hereinafter further described, and others apparent to those skilled in the art.

[0079] Also provided in Table 7 is the name of the vector which contains the cDNA clone. Each vector is routinely used in the art. The following additional information is provided for convenience.

[0080] Vectors Lambda Zap (U.S. Pat. Nos. 5,128,256 and 5,286,636), Uni-Zap XR (U.S. Pat. Nos. 5,128,256 and 5,286,636), Zap Express (U.S. Pat. Nos. 5,128,256-and 5,286,636), pBluescript (pBS) (Short, J. M. et al., Nucleic Acids Res. 16:7583-7600 (1988); Alting-Mees, M. A. and Short, J. M., Nucleic Acids Res. 17.9494 (1989)) and pBK (Alting-Mees, M. A. et al., Strategies 5:58-61 (1992)) are commercially available from Stratagene Cloning Systems, Inc., 11011 N. Torrey Pines Road, La Jolla, Calif., 92037. pBS contains an ampicillin resistance gene and pBK contains a neomycin resistance gene. Phagemid pBS may be excised from the Lambda Zap and Uni-Zap XR vectors, and phagemid pBK may be excised from the Zap Express vector. Both phagemids may be transformed into E. coli strain XL-1 Blue, also available from Stratagene.

[0081] Vectors pSport1, pCMVSport 1.0, pCMVSport 2.0 and pCMVSport 3.0, were obtained from Life Technologies, Inc., P. O. Box 6009, Gaithersburg, Md. 20897. All Sport vectors contain an ampicillin resistance gene and may be transformed into E. coli strain DH10B, also available from Life Technologies. See, for instance, Gruber, C. E., et al., Focus 15.59-(1993). Vector lafmid BA (Bento Soares, Columbia University, New York, N.Y.) contains an ampicillin resistance gene and can be transformed into E. coli strain XL-1 Blue. Vector pCR®2.1, which is available from Invitrogen, 1600 Faraday Avenue, Carlsbad, Calif. 92008, contains an ampicillin resistance gene and may be transformed into E. coli strain DH10B, available from Life Technologies. See, for instance, Clark, J. M., Nuc. Acids Res. 16:9677-9686 (1988) and Mead, D. et al., Bio/Technology 9: (1991).

[0082] The present invention also relates to the genes corresponding to SEQ ID NO:X, SEQ ID NO:Y, and/or the deposited clone (Clone ID NO:Z). The corresponding gene can be isolated in accordance with known methods using the sequence information disclosed herein. Such methods include preparing probes or primers from the disclosed sequence and identifying or amplifying the corresponding gene from appropriate sources of genomic material.

[0083] Also provided in the present invention are allelic variants, orthologs, and/or species homologs. Procedures known in the art can be used to obtain full-length genes, allelic variants, splice variants, full-length coding portions, orthologs, and/or species homologs of endocrine associated genes corresponding to SEQ ID NO:X or the complement thereof, polypeptides-encoded by SEQ ID NO:X or the complement thereof, and/or the cDNA contained in Clone ID NO:Z, using information from the sequences disclosed herein or the clones deposited with the ATCC. For example, allelic variants and/or species homologs may be isolated and identified by making suitable probes or primers from the sequences provided herein and screening a suitable nucleic acid source for allelic variants and/or the desired homologue.

[0084] The polypeptides of the invention can be prepared in any suitable manner. Such polypeptides include isolated naturally occurring polypeptides, recombinantly produced polypeptides, synthetically produced polypeptides, or polypeptides produced by a combination of these methods. Means for preparing such polypeptides are well understood in the art.

[0085] The polypeptides may be in the form of the secreted protein, including the mature form, or may be a part of a larger protein, such as a fusion protein (see below). It is often advantageous to include an additional amino acid sequence which contains secretory or leader sequences, pro-sequences, sequences which aid in purification, such as multiple histidine residues, or an additional sequence for stability during recombinant production.

[0086] The polypeptides of the present invention are preferably provided in an isolated form, and preferably are substantially purified. A recombinantly produced version of a polypeptide, including the secreted polypeptide, can be substantially purified using techniques described herein or otherwise known in the art, such as, for example, by the one-step method described in Smith and Johnson, Gene 67:31-40 (1988). Polypeptides of the invention also can be purified from natural, synthetic or recombinant sources using techniques described herein or otherwise known in the art, such as, for example, antibodies of the invention raised against the endocrine polypeptides of the present invention in methods which are well known in the art.

[0087] The present invention provides a polynucleotide comprising, or alternatively consisting of, the nucleic acid sequence of SEQ ID NO:X, and/or the cDNA sequence contained in Clone ID NO:Z. The present invention also provides a polypeptide comprising, or alternatively, consisting of, the polypeptide sequence of SEQ ID NO:Y, a polypeptide encoded by SEQ ID NO:X or the complement thereof, a polypeptide encoded by the cDNA contained in Clone ID NO:Z, and/or the polypeptide sequence encoded by a nucleotide sequence in SEQ ID NO:B as defined in column 6 of Table 1B. Polynucleotides encoding a polypeptide comprising, or alternatively consisting of the polypeptide sequence of SEQ ID NO:Y, a polypeptide encoded by SEQ ID NO:X, a polypeptide encoded by the-cDNA contained in Clone ID NO:Z and/or a polypeptide sequence encoded by a nucleotide sequence in SEQ ID NO:B as defined in column 6 of Table 1B are also encompassed by the invention. The present invention further encompasses a polynucleotide comprising, or alternatively consisting of, the complement of the nucleic acid sequence of SEQ ID NO:X, a nucleic acid sequence encoding a polypeptide encoded by the complement of the nucleic acid sequence of SEQ ID NO:X, and/or the cDNA contained in Clone ID NO:Z.

[0088] Moreover, representative examples of polynucleotides of the invention comprise, or alternatively consist of, one, two, three, four, five, six, seven, eight, nine, ten, or more of the sequences delineated in Table 1B column 6, or any combination thereof. Additional, representative examples of polynucleotides of the invention comprise, or alternatively consist of, one, two, three, four, five, six, seven, eight, nine, ten, or more of the complementary strand(s) of the sequences delineated in Table 1B column 6, or any combination thereof. In further embodiments, the above-described polynucleotides of the invention comprise, or alternatively consist of, sequences delineated in Table 1B, column 6, and have a nucleic acid sequence which is different from that of the BAC fragment having the sequence disclosed in SEQ ID NO:B (see Table 1B, column 5). In additional embodiments, the above-described polynucleotides of the invention comprise, or alternatively consist of, sequences delineated in Table 1B, column 6, and have a nucleic acid sequence which is different from that published for the BAC clone identified as BAC ID NO:A (see Table 1B, column 4). In additional embodiments, the above-described polynucleotides of the invention comprise, or alternatively consist of, sequences delineated in Table 1B, column 6, and have a nucleic acid sequence which is different from that contained in the BAC clone identified as BAC ID NO:A (see Table 1B, column 4). Polypeptides encoded by these polynucleotides, other polynucleotides that encode these polypeptides, and antibodies that bind these polypeptides are also encompassed by the invention. Additionally, fragments and variants of the above-described polynucleotides and polypeptides are also encompassed by the invention.

[0089] Further, representative examples of polynucleotides of the invention comprise, or alternatively consist of, one, two, three, four, five, six, seven, eight, nine, ten, or more of the sequences delineated in column 6 of Table 1B which correspond to the same Clone ID NO:Z (see Table 1B, column 1), or any combination thereof. Additional, representative examples of polynucleotides of the invention comprise, or alternatively consist of, one, two, three, four, five, six, seven, eight, nine, ten, or more of the complementary strand(s) of the sequences delineated in column 6 of Table 1B which correspond to the same Clone ID NO:Z (see Table 1B, column 1), or any combination thereof. In further embodiments, the above-described polynucleotides of the invention comprise, or alternatively consist of, sequences delineated in column 6 of Table 1B which correspond to the same Clone ID NO:Z (see Table 1B, column 1) and have a nucleic acid sequence which is different from that of the BAC fragment having the sequence disclosed in SEQ ID NO:B (see Table 1B, column 5). In additional embodiments, the above-described polynucleotides of the invention comprise, or alternatively consist of, sequences delineated in column 6 of Table 1B which correspond to the same Clone ID NO:Z (see Table 1B, column 1) and have a nucleic acid sequence which is different from that published for the BAC clone identified as BAC ID NO:A (see Table 1B, column 4). In additional embodiments, the above-described polynucleotides of the invention comprise, or alternatively consist of, sequences delineated in column 6 of Table 1B which correspond to the same Clone ID NO:Z (see Table 1B, column 1) and have a nucleic acid sequence which is different from that contained in the BAC clone identified as BAC ID NO:A (see Table 1B, column 4). Polypeptides encoded by these polynucleotides, other polynucleotides that encode these polypeptides, and antibodies that bind these polypeptides are also encompassed by the invention. Additionally, fragments and variants of the above-described polynucleotides and polypeptides are also encompassed by the invention.

[0090] Further, representative examples of polynucleotides of the invention comprise, or alternatively consist of, one, two, three, four, five, six, seven, eight, nine, ten, or more of the sequences delineated in column 6 of Table 1B which correspond to the same contig sequence identifer SEQ ID NO:X (see Table 1B, column 2), or any combination thereof. Additional, representative examples of polynucleotides of the invention comprise, or alternatively consist of, one, two, three, four, five, six, seven, eight, nine, ten, or more of the complementary strand(s) of the sequences delineated in column 6 of Table 1B which correspond to the same contig sequence identifer SEQ ID NO:X (see Table 1B, column 2), or any combination thereof. In further embodiments, the above-described polynucleotides of the invention comprise, or alternatively consist of, sequences delineated in column 6 of Table 1B which correspond to the same contig sequence identifer SEQ ID NO:X (see Table 1B, column 2) and have a nucleic acid sequence which is different from that of the BAC fragment having the sequence disclosed in SEQ ID NO:B (see Table 1B, column 5). In additional embodiments, the above-described polynucleotides of the invention comprise, or alternatively consist of, sequences delineated in column 6 of Table 1B which correspond to the same contig sequence identifer SEQ ID NO:X (see Table 1B, column 2) and have a nucleic acid sequence which is different from that published for the BAC clone identified as BAC ID NO:A (see Table 1B, column 4). In additional embodiments, the above-described polynucleotides of the invention comprise, or alternatively consist of, sequences delineated in column 6 of Table 1B which correspond to the same contig sequence identifer SEQ ID NO:X (see Table LB, column 2) and have a nucleic acid sequence which is different from that contained in the BAC clone identified as BAC ID NO:A (See Table 1B, column 4). Polypeptides encoded by these polynucleotides, other polynucleotides that encode these polypeptides, and antibodies that bind these polypeptides are also encompassed by the invention. Additionally, fragments and variants of the above-described polynucleotides and polypeptides are also encompassed by the invention.

[0091] Moreover, representative examples of polynucleotides of the invention comprise, or alternatively consist of, one, two, three, four, five, six, seven, eight, nine, ten, or more of the sequences delineated in the same row of Table 1B column 6, or any combination thereof. Additional, representative examples of polynucleotides of the invention comprise, or alternatively consist of; one, two, three, four, five, six, seven, eight, nine, ten, or more of the complementary strand(s) of the sequences delineated in the same row of Table 1B column 6, or any combination thereof. In preferred embodiments, the polynucleotides of the invention comprise, or alternatively consist of, one, two, three, four, five, six, seven, eight, nine, ten, or more of the complementary strand(s) of the sequences delineated in the same row of Table 1B column 6, wherein sequentially delineated sequences in the table (i.e. corresponding to those exons located closest to each other) are directly contiguous in a 5′ to 3′ orientation. In further embodiments, above-described polynucleotides of the invention comprise, or alternatively consist of, sequences delineated in the same row of Table 1B, column 6, and have a nucleic acid sequence which is different from that of the BAC fragment having the sequence disclosed in SEQ ID NO:B (see Table 1B, column 5). In additional embodiments, the above-described polynucleotides of the invention comprise, or alternatively consist of, sequences delineated in the same row of Table 1B, column 6, and have a nucleic acid sequence which is different from that published for the BAC clone identified as BAC ID NO:A (see Table 1B, column 4). In additional embodiments, the above-described polynucleotides of the invention comprise, or alternatively consist of, sequences delineated in the same row of Table 1B, column 6, and have a nucleic acid sequence which is different from that contained in the BAC clone identified as BAC ID NO:A (see Table 1B, column 4). Polypeptides encoded by these polynucleotides, other polynucleotides that encode these polypeptides, and antibodies that bind these polypeptides are also encompassed by the invention.

[0092] In additional specific embodiments, polynucleotides of the invention comprise, or alternatively consist of, one, two, three, four, five, six, seven, eight, nine, ten, or more of the sequences delineated in column 6 of Table 1B, and the polynucleotide sequence of SEQ ID NO:X (e.g., as defined in Table 1B, column 2) or fragments or variants thereof. Polypeptides encoded by these polynucleotides, other polynucleotides that encode these polypeptides, and antibodies that bind these polypeptides are also encompassed by the invention.

[0093] In additional specific embodiments, polynucleotides of the invention comprise, or alternatively consist of, one, two, three, four, five, six, seven, eight, nine, ten, or more of the sequences delineated in column 6 of Table 1B which correspond to the same Clone ID NO:Z (see Table 1B, column 1), and the polynucleotide sequence of SEQ ID NO:X (e.g., as defined in Table 1A or 1B) or fragments or variants thereof. In preferred embodiments, the delineated sequence(s) and polynucleotide sequence of SEQ ID NO:X correspond to the same Clone ID NO:Z. Polypeptides encoded by these polynucleotides, other polynucleotides that encode these polypeptides, and antibodies that bind these polypeptides are also encompassed by the invention.

[0094] In further specific embodiments, polynucleotides of the invention comprise, or alternatively consist of, one, two, three, four, five, six, seven, eight, nine, ten, or more of the sequences delineated in the same row of column 6 of Table 1B, and the polynucleotide sequence of SEQ ID NO:X (e.g., as defined in Table 1A or 1B) or fragments or variants thereof. In preferred embodiments, the delineated sequence(s) and polynucleotide sequence of SEQ ID NO:X correspond to the same row of column 6 of Table 1B. Polypeptides encoded by these polynucleotides, other polynucleotides that encode these polypeptides, and antibodies that bind these polypeptides are also encompassed by the invention.

[0095] In additional specific embodiments, polynucleotides of the invention comprise, or alternatively consist of a polynucleotide sequence in which the 3′ 10 polynucleotides of one of the sequences delineated in column 6 of Table 1B and the 5′ 10 polynucleotides of the sequence of SEQ ID NO:X are directly contiguous. Nucleic acids which hybridize to the complement of these 20 contiguous polynucleotides under stringent hybridization conditions or alternatively, under lower stringency conditions, are also encompassed by the invention. Polypeptides encoded by these polynucleotides and/or nucleic acids, other polynucleotides and/or nucleic acids that encode these polypeptides, and antibodies that bind these polypeptides are also encompassed by the invention. Additionally, fragments and variants of the above-described polynucleotides, nucleic acids, and polypeptides are also encompassed by the invention.

[0096] In additional specific embodiments, polynucleotides of the invention comprise, or alternatively consist of, a polynucleotide sequence in which the 3′ 10 polynucleotides of one of the sequences delineated in column 6 of Table 1B and the 5′ 10 polynucleotides of a fragment or variant of the sequence of SEQ ID NO:X are directly contiguous Nucleic acids which hybridize to the complement of these 20 contiguous polynucleotides under stringent hybridization conditions or alternatively, under lower stringency conditions, are also encompassed by the invention. Polypeptides encoded by these polynucleotides and/or nucleic acids, other polynucleotides and/or nucleic acids encoding these polypeptides, and antibodies that bind these polypeptides are also encompassed by the invention. Additionally, fragments and variants of the above-described polynucleotides, nucleic acids, and polypeptides are also encompassed by the invention.

[0097] In specific embodiments, polynucleotides of the invention comprise, or alternatively consist of, a polynucleotide sequence in which the 3′ 10 polynucleotides of the sequence of SEQ ID NO:X and the 5′ 10 polynucleotides of the sequence of one of the sequences delineated in column 6 of Table 1B are directly contiguous. Nucleic acids which hybridize to the complement of these 20 contiguous polynucleotides under stringent hybridization conditions or alternatively, under lower stringency conditions, are also encompassed by the invention. Polypeptides encoded by these polynucleotides and/or nucleic acids, other polynucleotides and/or nucleic acids encoding these polypeptides, and antibodies that bind these polypeptides are also encompassed by the invention. Additionally, fragments and variants of the above-described polynucleotides, nucleic acids, and polypeptides are also encompassed by the invention.

[0098] In specific embodiments, polynucleotides of the invention comprise, or alternatively consist of, a polynucleotide sequence in which the 3′ 10 polynucleotides of a fragment or variant of the sequence of SEQ ID NO:X and the 5′ 10 polynucleotides of the sequence of one of the sequences delineated in column 6 of Table 1B are directly contiguous. Nucleic acids which hybridize to the complement of these 20 contiguous polynucleotides under stringent hybridization conditions or alternatively, under lower stringency conditions, are also encompassed by the invention. Polypeptides encoded by these polynucleotides and/or nucleic acids, other polynucleotides and/or nucleic acids encoding these polypeptides, and antibodies that bind these polypeptides are also encompassed by the invention. Additionally, fragments and variants of the above-described polynucleotides, nucleic acids, and polypeptides, are also encompassed by the invention.

[0099] In further specific embodiments, polynucleotides of the invention comprise, or alternatively consist of, a polynucleotide sequence in which the 3′ 10 polynucleotides of one of the sequences delineated in column 6 of Table 1B and the 5′ 10 polynucleotides of another sequence in column 6 are directly contiguous. Nucleic acids which hybridize to the complement of these 20 contiguous polynucleotides under stringent hybridization conditions or alternatively, under lower stringency conditions, are also encompassed by the invention. Polypeptides encoded by these polynucleotides and/or nucleic acids, other polynucleotides and/or nucleic acids encoding these polypeptides, and antibodies that bind these polypeptides are also encompassed. by the invention. Additionally, fragments and variants of the above-described polynucleotides, nucleic acids, and polypeptides are also encompassed by the invention.

[0100] In specific embodiments, polynucleotides of the invention comprise, or alternatively consist of, a polynucleotide sequence in which the 3′ 10 polynucleotides of one of the sequences delineated in column 6 of Table 1B and the 5′ 10 polynucleotides of another sequence in column 6 corresponding to the same Clone ID NO:Z (see Table 1B, column 1) are directly contiguous. Nucleic acids which hybridize to the complement of these 20 lower stringency conditions, are also encompassed by the invention. Polypeptides encoded by these polynucleotides and/or nucleic acids, other polynucleotides and/or nucleic acids encoding these polypeptides, and antibodies that bind these polypeptides are also encompassed by the invention. Additionally, fragments and variants of the above-described polynucleotides, nucleic acids, and polypeptides are also encompassed by the invention.

[0101] In specific embodiments, polynucleotides of the invention comprise, or alternatively consist of, a polynucleotide sequence in which the 3′ 10 polynucleotides of one sequence in column 6 corresponding to the same contig sequence identifer SEQ ID NO:X (see Table 1B, column 2) are directly contiguous. Nucleic acids which hybridize to the complement of these 20 contiguous polynucleotides under stringent hybridization conditions or alternatively, under lower stringency conditions, are also encompassed by the invention. Polypeptides encoded by these polynucleotides and/or nucleic acids, other polynucleotides and/or nucleic acids encoding these polypeptides, and antibodies that bind these polypeptides are also encompassed by the invention. Additionally, fragments and variants of the above-described polynucleotides, nucleic acids, and polypeptides are also encompassed by the invention.

[0102] In specific embodiments, polynucleotides of the invention comprise, or alternatively consist of a polynucleotide sequence in which the 3′ 10 polynucleotides of one. of the sequences delineated in column 6 of Table 1B and the 5′ 10 polynucleotides of another sequence in column 6 corresponding to the same row are directly contiguous. In preferred embodiments, the 3′ 10 polynucleotides of one of the sequences delineated in column 6 of Table 1B is directly contiguous with the 5′ 10 polynucleotides of the next sequential exon delineated in Table 1B, column 6. Nucleic acids which hybridize to the complement of these 20 contiguous polynucleotides under stringent hybridization conditions or alternatively, under lower stringency conditions, are also encompassed by the invention. Polypeptides encoded by these polynucleotides and/or nucleic acids, other polynucleotides and/or nucleic acids encoding these polypeptides, and antibodies that bind these polypeptides are also encompassed by the invention. Additionally, fragments and variants of the above-described polynucleotides, nucleic acids, and polypeptides are also encompassed by the invention.

[0103] Many polynucleotide sequences, such as EST sequences, are publicly available and accessible through sequence databases and may have been publicly available prior to conception of the present invention. Preferably, such related polynucleotides are specifically excluded from the scope of the present invention. Accordingly, for each contig sequence (SEQ ID NO:X) listed in the third column of Table 1A, preferably excluded are one or more polynucleotides comprising a nucleotide sequence described by the general formula of a-b, where a is any integer between 1 and the final nucleotide minus 15 of SEQ ID NO:X, b is an integer of 15 to the final nucleotide of SEQ ID NO:X, where both a and b correspond to the positions of nucleotide residues shown in SEQ ID NO:X, and where b is greater than or equal to a+14. More specifically, preferably excluded are one or more polynucleotides comprising a nucleotide sequence described by the general formula of a-b, where a and b are integers as defined in columns 4 and 5, respectively, of Table 3. In specific embodiments, the polynucleotides of the invention do not consist of at least one, two, three, four, five, ten, or more of the specific polynucleotide sequences referenced by the Genbank Accession No. as disclosed in column 6 of Table 3 (including for example, published sequence in connection with a particular BAC clone). In further embodiments, preferably excluded from the invention are the specific polynucleotide sequence(s) contained in the clones corresponding to at least one, two, three, four, five, ten, or more of the available material having the accession numbers identified in the sixth column of this Table (including for example, the actual sequence contained in an identified BAC clone). In no way is this listing meant to encompass all of the sequences which may be excluded by the general formula, it is just a representative example. All references available through these accessions are hereby incorporated by reference in their entirety.

TABLE 3

| Clone ID | SEQ ID | Contig | EST Disclaimer | | |
|---|---|---|---|---|---|
| NO: Z | NO: X | ID: | Range of a | Range of b | Accession #'s |
| HATAA38 | 11 | 963315 | 1-378 | 15-392 | AA318542, AA046648, H11810, AA046635, AA046760, AA047445, |
| | | | | | AA045630, AA046774, H11781, AA305491, H82177, Z21423, AL137438, |
| | | | | | and AL358613. |
| HATAC35 | 12 | 928004 | 1-338 | 15-352 | AA318836, AA319149, AC073148, and AC073148. |
| HATAE19 | 13 | 508525 | 1-389 | 15-403 | AA319201, AC005045, AC005045, AC005045, AC005045, AC073423, |
| | | | | | AC073423, and AC073423. |
| HATAN18 | 14 | 504600 | 1-320 | 15-334 | AA319548, AA319110, AL110169, AL157938, AL157938, and AL157938. |
| HATAQ04 | 15 | 928020 | 1-359 | 15-373 | AA319213, AC021777, AC021777, AC021777, AP001889, AP001889, and |
| | | | | | AP001889. |
| HATAY60 | 16 | 522934 | 1-325 | 15-339 | AA319252, AC006344, AC006344, and AC006344. |
| HATAZ55 | 17 | 889014 | 1-205 | 15-219 | AA319406, AA319145, AA318954, AC025853, and AC025853. |
| HATBB73 | 18 | 508537 | 1-293 | 15-307 | AA319522, AC004742, AC004742, AC004742, AC024155, and AC024155. |
| HATB115 | 19 | 660745 | 1-239 | 15-253 | AA319278, AA319712, AL139223, AL139223, AL390245, and AL390245. |
| HATBM24 | 20 | 527201 | 1-318 | 15-332 | AA319613, AC015531, and AC015531. |
| HATBS54 | 21 | 622676 | 1-273 | 15-287 | AA319506, AI761496, F27289, AW246060, AI589820, AA176453, |
| | | | | | AI659956, N28865, AA176931, AW248979, AI201823, AW328065, |
| | | | | | W21375, AI360249, W77988, AI695732, AI191340, AI086569, AW439981, |
| | | | | | AA934080, AA814870, AI017668, AW073134, AA994848, AI492634, |
| | | | | | AI745302, AI369221, R29490, W73944, AA594425, AA978342, AA636013, |
| | | | | | AA534985, AA563868, AA977284, AI739388, N98853, AI424181, |
| | | | | | AA364320, F19686, F28148, N69881, AA861498, F30854, F25835, |
| | | | | | AI696713, AI868968, F19018, AA169837, and AF044959. |
| HATCA71 | 22 | 530380 | 1-327 | 15-341 | AC007014, AC007493, AC007493, AC007014, AC007014, and AC007014. |
| HATCB55 | 23 | 530383 | 1-331 | 15-345 | AI200855, AC009118, AC009118, and AC009118. |
| HATCE75 | 24 | 523863 | 1-348 | 15-362 | |
| HATCG79 | 25 | 530533 | 1-255 | 15-269 | AC031980. |
| HATCK46 | 26 | 530428 | 1-255 | 15-269 | AC024004, AC040905, AL359699, AC034129, AC027205, and AC068536. |
| HATCK51 | 27 | 530427 | 1-338 | 15-352 | AC010160. |
| HATCK74 | 28 | 507347 | 1-312 | 15-326 | |
| HATCN27 | 29 | 573594 | 1-338 | 15-352 | |
| HATCW02 | 30 | 958548 | 1-343 | 15-357 | |
| HATCX57 | 31 | 972402 | 1-209 | 15-223 | AW450531, and AC012283. |
| HATCX60 | 32 | 529946 | 1-107 | 15-121 | AI887808, AC010317, AC010317, AC010317, AC021081, AC021081, |
| | | | | | AC021081, AC012620, AC012620, and AC012620 |
| HATDD31 | 33 | 698297 | 1-415 | 15-429 | AA663167. |
| HATDE50 | 34 | 461477 | 1-519 | 15-533 | AI493466, AP000555, AC019205, AC019205, AC019205, AL365232, |
| | | | | | AL365232, AL365232, AL133336, AL133336, and AL133336. |
| HATDI85 | 35 | 573578 | 1-263 | 15-277 | AF139813, AC004770, AC004228, AP000591, AP000591, AP000591, |
| | | | | | AP002380, AP002380, AC004770, AC004770, AF139813, AF139813, |
| | | | | | AF139813, AC004228, and AC004228. |
| HATDL29 | 36 | 848053 | 1-402 | 15-416 | AA426131, AA215616, AI342808, AI818129, AI075681, AI420319, |
| | | | | | AI498284, AI082215, AA993551, AI458345, AA397962, AA704945, |
| | | | | | AA435873, AA405849, AI744008, AW016400, AL139184, AL139184, and |
| | | | | | AL138960. |
| HATDN54 | 37 | 573622 | 1-299 | 15-313 | AI762522, AI023140, AL034375, AL034375, AL034375, AL034375, |
| | | | | | AL138883, AL138883, and AL138883. |
| HATDO64 | 38 | 573620 | 1-351 | 15-365 | |
| HATDR20 | 39 | 573535 | 1-204 | 15-218 | AC003681, and AC003681. |
| HATDT90 | 40 | 524177 | 1-133 | 15-147 | AL133735, AL049631, AL049631, AL049631, and AL049631. |
| HATEH76 | 41 | 878096 | 1-648 | 15-662 | AA191705, AI800430, AC068080, AC068080, and AC068080. |
| HEFMB58 | 42 | 665206 | 1-449 | 15-463 | AI032875, N57913, AA577812, AC000353, AC004929, AC003013, |
| | | | | | AC005104, AL009174, AF001548, X55448, AC020663, AC005562, |
| | | | | | AC003663, AC007707, AC005484, Z82244, AC004910, AC005520, L44140, |
| | | | | | AC004675, Z84466, AF088219, AC008040, AP000350, AC004841, Z80998, |
| | | | | | AC004217, AL031005, AC005696, AL022313, AC002287, AL031657, |
| | | | | | AC006509, AC006017, AC004699, AL031774, and AC004835. |
| HEFME17 | 43 | 662268 | 1-405 | 15-419 | AI932599, AA484373, AI084294, AI027459, AW002350, AA470969, |
| | | | | | AA531079, AW328331, AA758366, AA811208, AA744018, AI801482, |
| | | | | | AA501718, AA487726, AI192631, AL038936, AI002734, AI345366, |
| | | | | | AI310873, AA687535, AA492391, AA757775, AA011026, AA847499, |
| | | | | | AP000065, U91326, AC020663, AP000557, AL049872, AC002984, |
| | | | | | AL008715, AC004526, AC006111, AL022320, AC004478, AL109984, |
| | | | | | AC004019, AC007842, AL050318, Z83820, X54175, AL031230, AC006501, |
| | | | | | AC007055, AC006121, AC002470, AL021939, Z95114, AP000208, |
| | | | | | AP000130, AC007250, AP000247, AC005803, AJ229042, AL050308, |
| | | | | | AL133448, AC002310, AL139054, AL031427, AC002073, AL080285, |
| | | | | | AC003080, AL049776, AC003101, AL031777, AC004152, AC006385, |
| | | | | | AL049539, AP000126, AP000204, AP000244, AC006450, X54177, |
| | | | | | AC005940, AC005231, AC007488, AL133500, AL024508, AL035422, |
| | | | | | Z22650, AC003664, AC006120, AC007686, AC004595, U78027, Z83838, |
| | | | | | AL109799, AF111169, AF064863, AF091512, AC006978, AC006971, |
| | | | | | AC006071, AC007283, AC006285, U07562, AC003964, L35676, AC006261, |
| | | | | | AC004098, AC005913, AC004263, AC004678, AC007199, AC006992, |
| | | | | | AC005694, AC004000, AC005696, AC009227, AL008718, AJ003147, |
| | | | | | AC004815, AJ011930, AC005207, AF010399, AC005089, AP001067, |
| | | | | | AC005527, AC005800, AC006544, AL035495, Z93017, AL009179, |
| | | | | | AC005071, AC016026, AC005899, AP000556, AC006001, AC005066, |
| | | | | | AC005015, AL031311, AL049795, AC004465, AF053356, AF075080, |
| | | | | | AC007626, AC007626, AC007626, AP000065, and AP000065. |
| HIABC73 | 44 | 509663 | 1-521 | 15-535 | AA348793, U92032, Z84489, AC003669, AC009144, AC009144, AL353727, |
| | | | | | and AL353727. |
| HIABI65 | 45 | 753952 | 1-331 | 15-345 | AA348900, AA349252, AA382519, AI469586, AW139760, AA568853, |
| | | | | | AC002381, AF196969, AC005295, Z97054, AC005924, AL031681, |
| | | | | | AC006261, AC004491, AC000353, AF053356, AC007279, AC002306, |
| | | | | | AC005484, AP000697, AL035458, AC004616, AC004953, AC002059, |
| | | | | | AC002476, AF001549, AC006450, AF139813, AL080243, AC007068, |
| | | | | | AL121655, AP000553, AC005531, U29953, AC007021, AP000213, |
| | | | | | AL133355, AF196779, AL009181, AC003962, AP000343, AP000135, |
| | | | | | AC006449, AC005332, AC006132, AC007842, AF047825, AC005072, |
| | | | | | AC002036, AC004678, AC004967, AL049631, Z98304, AC005409, |
| | | | | | AC004686, AL033392, AC006953, AP000031, AC003048, AC005844, |
| | | | | | AC005011, AC002425, AF196970, AC018636, and AC018636. |
| HIATE15 | 46 | 715747 | 1-255 | 15-269 | R94986, AI684980, AA180248, AI979299, AI086600, AI084760, AW237108, |
| | | | | | AI916501, AA149335, AA178960, AI418210, AI560842, AA977225, |
| | | | | | AI242666, N72326, AA962520, AA149336, R95891, AA058354, N52827, |
| | | | | | AW140010, R94903, AI023032, AI052729, AA084403, AA946732, |
| | | | | | AI638410, AI860690, AI277418, AL354836, AL354836, AL354836, |
| | | | | | AL078633, AL078633, and AL078633. |
| HIATG66 | 47 | 967764 | 1-259 | 15-273 | |
| HNHHD37 | 48 | 844843 | 1-646 | 15-660 | |
| HPDCA64 | 49 | 509426 | 1-288 | 15-302 | AA367313, AA366075, and AL117351. |
| HPDDY59 | 50 | 887864 | 1-336 | 15-350 | AA366914. |
| HPDEG54 | 51 | 522679 | 1-220 | 15-234 | AA367264, AA367468, AW389839, AW389804, U80736, AC007501, |
| | | | | | AC007490, AC007490, AC007490, AC007501, AC007501, and AC007501. |
| HPDEK41 | 52 | 508547 | 1-323 | 15-337 | AA366282, AA367409, AL162724, AL162724, and AL162724. |
| HPTAC80 | 53 | 671552 | 1-404 | 15-418 | AA308605, AI057534, AA534419, AI697974, AA135705, AA045240, |
| | | | | | W44320, AI129494, AI128405, AA873442, AI582179, AI130805, |
| | | | | | AW005547, AI027835, AA311025, AI261770, AI017720, AI080641, |
| | | | | | AI831818, AA609864, AA310617, AI090772, AA757159, W77896, N31987, |
| | | | | | N66576, AI167796, AI354304, AA187339, AA722568, AI358996, AI143680, |
| | | | | | N49600, AI189713, AA371785, AA128004, AI141441, AA430529, |
| | | | | | AA890184, AI708518, AA040330, AI066662, AW001396, AI582164, |
| | | | | | W67462, AI090339, AI149573, AA053309, AI026783, W67463, AI419239, |
| | | | | | AA552896, AI028331, AA772657, AI141588, AI051357, AA416949, |
| | | | | | AI831588, N30482, AA778261, AI864908, AA781892, N32688, AA782180, |
| | | | | | AA845326, AA863152, AI298248, AI681026, N93973, AI268162, |
| | | | | | AA888806, AA683403, AA307970, AI298902, W68571, W75987, H49596, |
| | | | | | AA055396, AA513703, AI880375, AA338836, W95188, W93320, N22984, |
| | | | | | W94681, AA393344, AA683410, AA531047, AA084552, AA446281, |
| | | | | | N39830, AA430614, H50491, H62170, AI185406, W47596, W45692, |
| | | | | | W68570, W40342, AW451398, H49690, AI024585, AI336374, AI038635, |
| | | | | | AA492522, N26677, AA431017, AA719894, AA937773, AA365150, |
| | | | | | AA371846, AI872974, AW057777, AA973628, AA374102, AA324843, |
| | | | | | H22409, N21259, AA362590, W47557, H79942, AA366853, AA040412, |
| | | | | | AA359641, AA374177, T94006, AI139292, AI090676, AA295954, |
| | | | | | AA764919, AA834431, AI887007, N98836, N71627, AA360383, H89699, |
| | | | | | AA093649, AA328770, AA058605, AI971850, N70706, H23706, T90651, |
| | | | | | AA412627, AI525300, AI242602, W95320, AA770292, AA653865, |
| | | | | | AA311004, R37526, AA470042, T50074, AA937780, AA913196, AA993157, |
| | | | | | AI217212, H22410, AA954834, W94735, AI271971, AI421988, AI383730, |
| | | | | | AA613798, AA528534, AA902749, AA128084, W72210, T50012, |
| | | | | | AA913662, AA757251, AA382069, N58222, AW262239, AW264856, |
| | | | | | AI749726, H49968, T83195, AA128039, AA493248, AA055397, AA807427, |
| | | | | | AI688368, AA968929, AA844155, H99584, AA771902, AI349549, |
| | | | | | AA228666, AI364153, AI857880, N75046, H97236, H57138, AA346166, |
| | | | | | AA058818, AA338799, W93430, AA374674, AA071378, W01641, N46911, |
| | | | | | T93328, AA338800, H79943, AW050691, W05773, H23705, AA385872, |
| | | | | | AA551642, AA481297, AA308687, T90665, R36682, AA345267, AI879771, |
| | | | | | AW128837, T83179, AA309563, AA976678, AA552808, AA995261, |
| | | | | | N56137, AI088603, AA355080, AI589043, AI694419, D55979, D19864, |
| | | | | | AA844416, AI299942, AI312818, AA412487, T24652, AF161501, |
| | | | | | AF110774, and AC005972. |
| HPTBA43 | 54 | 573878 | 1-392 | 15-406 | AA479447, W37120, C04220, C04659, AA811741, R22772, AA669573, |
| | | | | | AA834828, AA542870, H27243, R86280, AA527963, AA180738, |
| | | | | | AA355128, AA636062, T07327, T52561, AA569448, T03401, AA663373, |
| | | | | | AA668166, AA708651, AA828153, T89662, AA569179, N23088, |
| | | | | | AA525232, AA199748, AA079076, AW022221, AA353689, AA936084, |
| | | | | | AA825185, T82167, AW089016, AA488689, R08153, AI174489, AA555168, |
| | | | | | T94860, T64196, AL046023, F11475, AA365667, AA077756, AA309318, |
| | | | | | AA665532, F04021, H28863, AA744206, AA297930, AA856945, AA308827, |
| | | | | | M85921, H68012, AA636102, C16687, N22153, AW073498, AI929410, |
| | | | | | AI753672, AI750950, AA605243, AA730359, AA367180, AI143653, |
| | | | | | AA961554, AA633856, AL037354, AA304977, T59270, R53995, AA169234, |
| | | | | | AA757426, AA835931, AW103251, F11894; AA501371, AA832124, |
| | | | | | AI732116, AI732176, H25938, H80919, AA745373, AA737544, AI761566, |
| | | | | | H93568, AW087226, AA457081, AA303598, AA621838, AA453151, |
| | | | | | AA481765, AA830826, T65131, AI654658, AA605020, AA020882, |
| | | | | | AI445373, T92588, AA738283, AA729004, AC002375, AF042089, |
| | | | | | AL021391, AL049856, AC004882, AC004477, AB016625, AC004628, |
| | | | | | AC004647, AC005736, AC006486, AC006538, AL049745, AC006211, |
| | | | | | Z98044, AC003070, X92108, AC007292, AP000043, AP000111, AL031685, |
| | | | | | AC002117, AC004938, AC004973, Z99943, AL050350, AL022316, |
| | | | | | AC007955, AC007284, X02883, U63721, Z14095, U10087, J03071, |
| | | | | | AP000141, AC003007, AP000088, D87675, AC004031, AB009589, U78027, |
| | | | | | AL035249, AP000503, AL132826, AF047825, AC006529, AF134726, |
| | | | | | AF129756, AC008039, AC002468, L13711, AL035422, U95742, AC004671, |
| | | | | | AC004765, AC007796, AP000502, AF019413, AL034379, AL079303, |
| | | | | | AC005632, X82126, AF029062, AB000876, AC004181, AC007283, |
| | | | | | AF064861, AC002094, AC004984, U50871, AL035699, AL034402, |
| | | | | | AC005399, AC007077, Z97353, AF032087, M15366, L38592, AB003151, |
| | | | | | AP000688, AC007773, AL133163, AF097365, AB016767, AC005773, |
| | | | | | AF114847, AF121948, AF128893, AB022537, AL021807, AC004883, |
| | | | | | AC006571, AL031228, AF029750, AC000092, Z71187, AC008078, |
| | | | | | AC003043, AC009247, AL031311, AF017104, AC006362, AC008015, |
| | | | | | M62505, AL022327, AC013417, AC005856, U91323, AC007421, AP000355, |
| | | | | | AC005372, Z78022, AC004865, AP000553, AF111168, X61099, AL049832, |
| | | | | | AP000506, U68061, AP000549, AC006123, M26434, AP000116, AP000049, |
| | | | | | AP000311, Z97054, AL020997, AC002395, AC002350, AC006536, Z99716, |
| | | | | | AC009225, AC005071, AJ000219, AC005972, AC004522, AC004893, |
| | | | | | AC006084, Z93017, AC004000, AC006965, AL022722, AC004820, |
| | | | | | AC005668, AL035685, AC006552, AC000134, AC000353, AL135879, |
| | | | | | AL121790, AC005057, AF049895, AB000882, AL031009, Z73359, |
| | | | | | AC003692, AF130247, AP000193, AP000089, AP000142, AL050321, |
| | | | | | Z98036, AC009308, AL050322, AP000050, AC004825, AC004659, |
| | | | | | AP000117, AC009336, AC005701, AL110505, AL022329, Z83851, |
| | | | | | AC005382, Z81364, AL031284, AC002407, AL031597, AP000008, |
| | | | | | AC004813, AL049843, AL031983, AL035079, AC006441, AF003529, |
| | | | | | AC006052, Z98304, X57103, AC004235, AC000049, AC015853, AC002115, |
| | | | | | Z74739, AL035457, AC006996, AC005375, AC005520, AL132987, |
| | | | | | AL121754, AC006581, AL135744, X88892, AF164525, AC008975, |
| | | | | | AF190465, AL078581, AC000159, AC004878, AF030453, AC006014, |
| | | | | | AL022396, Z94721, AC005519, AC004383, AC005940, AC005088, |
| | | | | | AC007263, AC004887, AC005488, AL031591, Y15727, and AB000931. |
| HPTBB78 | 55 | 967902 | 1-440 | 15-454 | |
| HPTDB64 | 56 | 526236 | 1-242 | 15-256 | AW338973, AA508426, AI436454, and AC006057. |
| HPTGB50 | 57 | 867340 | 1-327 | 15-341 | |
| HPTRB72 | 58 | 973817 | 1-926 | 15-940 | AA738160, AI825220, AA860383, and N23535. |
| HPTRD50 | 59 | 710425 | 1-424 | 15-438 | |
| HPTRE22 | 60 | 589333 | 1-373 | 15-387 | AI391448, AA490432, AW268429, AA991264, AW338162, H09250, |
| | | | | | H66612, AW298491, AA425337, AW190080, AA938488, AW438651, |
| | | | | | AA458967, AI521978, AI693418, AA922102, AW008711, AI215831, |
| | | | | | AA983181, AI394561, AI147281, AI694713, AI146509, AW338561, |
| | | | | | AW450614, AA507844, C01815, AW341315, AI458505, AA976668, |
| | | | | | AA504172, AA490327, and AC005789. |
| HPTRE26 | 61 | 576790 | 1-329 | 15-343 | AC013489, AC013489, and AC013489. |
| HPTRG91 | 62 | 773605 | 1-565 | 15-579 | AI890767, R55491, R67626, AI174639, AC010319, AC010319, and |
| | | | | | AC010319. |
| HPTRJ48 | 63 | 575987 | 1-334 | 15-348 | |
| HPTRJ77 | 64 | 575981 | 1-151 | 15-165 | AI445671. |
| HPTRL28 | 65 | 575991 | 1-330 | 15-344 | |
| HPTRL32 | 66 | 964772 | 1-337 | 15-351 | |
| HPTRL46 | 67 | 575992 | 1-173 | 15-187 | AI698719, AF010404, and AF010403. |
| HPTRN57 | 68 | 916998 | 1-597 | 15-611 | |
| HPTRO02 | 69 | 920338 | 1-312 | 15-326 | AI817872, AL031713, AC012004, AC012004, AL031713, AL031713, |
| | | | | | AC009041, and AC009041. |
| HPTRO92 | 70 | 960736 | 1-361 | 15-375 | AC002536. |
| HPTRS54 | 71 | 953674 | 1-400 | 15-414 | |
| HPTRS61 | 72 | 841701 | 1-355 | 15-369 | AA476827, AL021453, and AL021453. |
| HPTRS63 | 73 | 675992 | 1-311 | 15-325 | AI903044, AC000395, AC000395, and AC000395. |
| HPTRV21 | 74 | 953489 | 1-438 | 15-452 | AA748742, AA401711, AC005258, AC005258, and AC005258. |
| HPTRW89 | 75 | 575995 | 1-422 | 15-436 | |
| HPTRX19 | 76 | 975341 | 1-510 | 15-524 | AW378532, D59467, D80227, AW177440, C14389, C14331, D80269, |
| | | | | | D59275, D80038, D59610, D80195, D80164, D58283, D59502, D59859, |
| | | | | | D80022, D80166, D51423, D59619, D80210, D51799, D80391, D80240, |
| | | | | | D80253, D80378, D80043, D59787, D81030, T03269, D80212, C15076, |
| | | | | | D80196, D80188, D50979, D80219, D59927, D80241, D59889, D80193, |
| | | | | | AA305409, D57483, D80366, D50995, D81026, D80024, C14429, |
| | | | | | AW178893, D51022, AA514188, D80045, AA305578, D51060, D80251, |
| | | | | | AW360811, AW179328, D80248, D80522, C75259, C14014, AW176467, |
| | | | | | AW375405, D51250, AW377671, AW177501, AW177511, AW178775, |
| | | | | | AW369651, AW178762, AW375406, AA514186, AW179332, AW366296, |
| | | | | | D80133, AW360844, AW177731, AW360817, AW352117, AW378534, |
| | | | | | AW377672, AW179023, AW178905, D80247, AW352158, AW377676, |
| | | | | | AW179020, AW352170, AW352171, D52291, AW178906, D80134, |
| | | | | | AW178907, AW178908, AW179019, AW179024, D80439, C05695, D58253, |
| | | | | | D80268, AW179329, AW177722, AW177505, AW360841, AW177733, |
| | | | | | D59695, AW178909, AW177456, AW179004, F13647, AW178980, |
| | | | | | AI905856, AW378528, AW178754, AW179018, D80132, D80302, D51103, |
| | | | | | AI910186, AW179009, AW179012, AW360834, C14227, AW178914, |
| | | | | | AW178911, AW378525, D80157, T48593, AW378540, D81111, D51759, |
| | | | | | T11417, C14407, AW367967, AW178983, AW177728, AW178774, |
| | | | | | AW378543, AW352163, D58246, AW178986, AW178781, AW177723, |
| | | | | | C06015, D59627, AW352120, AW360855, AW367950, D51097, Z21582, |
| | | | | | D80258, D59653, D59503, D45260, AW177734, AI557751, AA809122, |
| | | | | | C03092, H67854, D80014, D58101, AW378533, H67866, AI525923, C14344, |
| | | | | | T03116, D59317, AI525917, D80064, D60214, C14973, AI557774, T03048, |
| | | | | | D51221, D59474, D59551, AI535686, AI525242, AI525920, AA285331, |
| | | | | | AW378542, D60010, AA514184, AW378539, AI525227, A84916, |
| | | | | | AR060138, AJ132110, A62300, A62298, AR008278, D34614, AR018138, |
| | | | | | AF058696, X67155, Y17188, D26022, A25909, AB028859, A67220, D89785, |
| | | | | | A78862, Y12724, D88547, X82626, A82595, AB002449, A94995, |
| | | | | | AR060385, AR025207, I82448, I50126, I50132, I50128, I50133, AR008443, |
| | | | | | AR066488, AR016514, A45456, A26615, AR052274, AR016808, Y09669, |
| | | | | | A43192, A43190, AR038669, AR066487, A30438, AB012117, X68127, |
| | | | | | D50010, Y17187, A85396, AR066482, A44171, A63261, A85477, I19525, |
| | | | | | A86792, I14842, and AR066490. |
| HPTTA18 | 77 | 954361 | 1-343 | 15-357 | |
| HPTTB59 | 78 | 522659 | 1-338 | 15-352 | |
| HPTTE22 | 79 | 968632 | 1-430 | 15-444 | AI869204, AI084919, AW296952, AI202776, AW444506, AI658804, |
| | | | | | AA962226, and AI744100. |
| HPTTK61 | 80 | 951024 | 1-395 | 15-409 | AI791657, AA550924, AA551970, AA552560, AI821495, AI791635, |
| | | | | | AA487829, AA376896, AW238495, T17332, AI336771, AA846923, |
| | | | | | AA115865, AA488687, AA630476, AI869797, AA483973, N31323, |
| | | | | | AI088127, AA809125, AI932871, AA652949, AA579399, AI628922, |
| | | | | | AA631915, AI803767, T47138, R10340, AA599080, AW408767, T10218, |
| | | | | | F08546, AW238212, AA486352, AA831919, AW316599, AL022323, |
| | | | | | AL078581, AL033525, AC004150, AL049653, Z83843, AC004386, |
| | | | | | AC004408, AF196969, Z95331, AL031295, Z85986, AC004797, AC007193, |
| | | | | | AL023553, AC002420, AL035413, AC004686, AC006299, AC005274, |
| | | | | | AC006966, AF111167, AC004382, AL080243, AC003070, AC007093, |
| | | | | | AL008718, AL031274, AC004067, AC004757, AC006965, AL031228, |
| | | | | | AL096703, AL109827, AL022718, AF112482, AL050318, AC005624, |
| | | | | | AC005553, AF045555, AC004651, Z93017, AC006449, AC006011, |
| | | | | | AC005565, Z93930, AC008040, AC000064, AC002375, AC005874, |
| | | | | | AF134471, AF196779, AL022476, Z73359, AC003663, AC002126, X74984, |
| | | | | | AC004144, AC005696, AC005237, AC007227, Z93020, AP000072 |
| | | | | | AL031591, Z84484, AC005081, AP000493, Z83838, AF023268, AC005231, |
| | | | | | AL049872, AC007298, Z98946, AC006511, AC005833, Z84489, AC005821, |
| | | | | | AC001228, AP000688, AC007327, AF038458, AL049712, AC005722, |
| | | | | | AP000501, AL031447, AC006088, AC009247, AP000244, AC005841, |
| | | | | | AL031657, AC007566, AC006552, AC002347, AC020663, AF001550, |
| | | | | | AC004257, AC005962, AC004520, AC006571, AC006121, AL034420, |
| | | | | | AC005585, AP000250, AL022313, AC005695, AP000402, AL031432, |
| | | | | | AL022577, AC005994, AC002527, AC003101, AL049760, AP000522, |
| | | | | | AC015853, AC005211, AC005820, AL033518, AP000106, AP000038, |
| | | | | | AB000877, Z85987, AC005071, AC005370, Z82244, AF114156, AC004913, |
| | | | | | AL022238, AL050341, AC004750, AC006157, AL132712, U80017, |
| | | | | | AC002316, AC005562, Z97053, AC005519, U91323, AC006509, AC005661, |
| | | | | | AL049776, AL050306, AC005037, AC005412, U15177, AL109952, |
| | | | | | AC003030, AC004983, AC004228, AC008372, AB026898, AC005625, |
| | | | | | AC005829, L78810, AL009183, AP000126, AP000204, Z97630, AL023803, |
| | | | | | AC004000, AC007114, U52112, AC005284, AC005755, AC002364, |
| | | | | | AC004882, AL034429, AC004129, AC004841, AC004069, AC004816, |
| | | | | | AD000812, AC007151, AL031662, AF001552, Z98200, AB032978, Z82215, |
| | | | | | M63796, AP000211, AC005031, AL034549, AC004835, D49685, AC002094, |
| | | | | | AC005015, L78833, AL049757, AC005086, AC005616, AP000255, |
| | | | | | AC008041, AC006238, AP000512, AC006125, AC006285, AC004084, |
| | | | | | U78027, AC000134, AP000159, AL021368, AL109801, AL049795, Z83840, |
| | | | | | AC022898, and AC022898. |
| HPTTL50 | 81 | 693555 | 1-233 | 15-247 | AA828588, AA654998, AI721122, AL039958, AL036382, AI590038, |
| | | | | | AA244329, AI276164, AA078223, N84156, AA584749, AW082361, |
| | | | | | AA828569, AA947364, AI219747, AI923480, AA747276, AL041412, |
| | | | | | AA071182, AI890348, AW151016, F31204, AI637587, AA377730, F19258, |
| | | | | | AA515128, R25759, AW022046, AI537185, AW270284, AA515435, |
| | | | | | AI305766, H60239, R22239, AI266133, AI818620, AI613280, AA626747, |
| | | | | | AA365000, AA443065, AA569284, F37286, R24121, AA632994, AA613893, |
| | | | | | AL037554, AI225141, AA494103, AI474713, AL041368, AI493546, |
| | | | | | AI434706, AI521901, AI298977, AI879000, AI744188, AI859284, AI565581, |
| | | | | | AW193512, AA558697, AI341664, AI648558, AA077952, AI561335, |
| | | | | | AW074398, AI312149, F36273, T71998, AL079804, AA508080, AA747480, |
| | | | | | R72392, AW193432, AL079935, AA559290, R92911, AW327360, |
| | | | | | AA581342, AA659856, AA569187, AI281754, W49488, AI688846, |
| | | | | | AI963720, AI923140, AI284640, AW131034, AW261871, AW274349, |
| | | | | | F18974, W07032, AA650623, R93061, AL036523, AW193265, AW303196, |
| | | | | | AI350211, AA594738, AW301350, W38648, AI610159, AI061334, |
| | | | | | AI282907, AW193295, AW157326, AI431303, AA664535, F25276, |
| | | | | | AA828704, AI608674, AI802526, AI679379, AA579283, AA457639, |
| | | | | | AI471481, H58672, AI679888, AW008317, AI359780, AI830390, |
| | | | | | AA075754, AI379719, AA224091, AW276827, AA366035, AI375710, |
| | | | | | AI623898, C06458, AL046409, AI289067, AI887483, AI611990, AW089789, |
| | | | | | F36404, AA731636, AA805996, AA776971, AA358122, AI133235, |
| | | | | | AA580662, AW302013, AI536146, AI286356, AA593060, R66997, |
| | | | | | AA167741, AI467877, AL048925, AI357288, AA086311, AA228329, |
| | | | | | AW021917, AA856953, AI246119, W25284, AW072433, AI679421, |
| | | | | | AA551575, AA947386, AW020141, AA669840, AW150798, H13868, |
| | | | | | AI347650, R27246, AA365347, AI890281, AA134367, AI638655, F35659, |
| | | | | | T06264, AI679932, AI859834, N71724, AI619997, AI810143, AI270343, |
| | | | | | AI345418, AI053672, AA659083, AI286264, AI053429, T03203, AA095511, |
| | | | | | AA516207, AW264973, AI216799, AI273185, AI820539, AA332991, |
| | | | | | T12272, AW088058, H72075, AI334443, F29989, AA587256, AI921296, |
| | | | | | AA501344, AI886176, AW419262, R55111, AA569202, AI474388, |
| | | | | | AC002980, AC005771, AF084195, AL121603, AL008629, AC000052, |
| | | | | | AP000153, AF042090, AC005158, AL049776, AC008122, AL022165, |
| | | | | | AC000127, Z95400, AC006511, AL022161, AC008171, AP000008, |
| | | | | | AC002377, Z82900, AC005237, AC005610, AC004890, AC006581, |
| | | | | | AL031734, AL031904, AC002094, AC006121, AL121823, U82757, |
| | | | | | AL049692, AC003074, AL031429, AF094481, AC007774, AL034551, |
| | | | | | AL031650, AF126403, AC003684, AC004158, AP000459, AC005696, |
| | | | | | AF045448, AL121587, AF121781, X82817, AC006512, U47924, AP000704, |
| | | | | | AC005856, X82818, AL033544, AC005744, AC004041, AL020996, |
| | | | | | AC004996, AL031280, D86247, AC004417, AL031770, AL133249, |
| | | | | | AP000328, AP000123, AP000055, AP000170, AC004741, AC004870, |
| | | | | | U57007, AP000433, AL021707, AP000246, AC007666, AP000129, |
| | | | | | AP000207, U90093, AL023578, AC006373, AF064857, AJ006998, |
| | | | | | AL033521, L81692, AC005755, AL035659, AC005162, AC005341, |
| | | | | | AC006274, AL021786, AC005876, AC004519, AC005194, AC010175, |
| | | | | | AL133485, AC004104, Z97987, AC007462, AC005011, AC007406, |
| | | | | | AF090940, X54156, U94788, AC006166, AC006165, Z83819, AP000967, |
| | | | | | AB023051, AC007421, AF200465, AC004167, L13713, AP000512, |
| | | | | | AC004999, L13714, AC002394, AC002064, AC005924, AC007707, |
| | | | | | AC004883, AC004152, AC006055, AL080250, Z95152, AC006065, |
| | | | | | AC004019, AC007243, AC005366, AF007882, AF052684, AB028893, |
| | | | | | AL031708, AC004017, AL033543, AC005377, Z94044, AL031012, |
| | | | | | AC007546, AC005495, U57009, AL034412, X13794, AC021092, L47234, |
| | | | | | AC006486, AC005393, AC007237, AC010197, AL136295, AC005342, |
| | | | | | AC004900, AC011311, AC004388, AP000510, Y11950, Z75744, Z86063, |
| | | | | | AC003006, AC004812, Z98049, AC006213, AC007216, AC005013, |
| | | | | | AJ003147, AL008627, AC004894, AP000468, AJ011932, AL121892, |
| | | | | | AC005031, AC000066, AL049761, AC002996, AL049643, AC005164, |
| | | | | | AC004691, AP000855, AL021877, AC005520, AP000356, AJ010770, |
| | | | | | AC004949, AC003992, AC004010, AL049764, AC000368, AC005689, |
| | | | | | AC006292, AC006126, AP000223, AP000086, AL031055, AC004853, |
| | | | | | AC003046, AC005189, AC007539, AC007564, U02507, AL117471, |
| | | | | | AF144630, AC003971, AC006054, AF072099, AC007252, AC005852, |
| | | | | | Z81310, AC004603, AC005943, AL050339, AL031255, Z82217, AF110324, |
| | | | | | AC005773, AL050341, AC003983, AC005049, AC006392, AL049631, |
| | | | | | AC005410, AC005599, AC005154, AL133353, AC005531, Z83844, |
| | | | | | AC006120, AC007065, AC007773, AC005690, AL121652, AC006367, |
| | | | | | AC002545, AC004968, L13709, L13707, AC005291, AC002049, AC003014, |
| | | | | | AC003688, Z98751, AC006271, AC007242, AL031680, AC002382, |
| | | | | | AC008062, AL117344, AC004057, AC004862, AC020873, AC020873, |
| | | | | | AC027442, AC073446, AL355975, AL358115, AL358115, AC021162, |
| | | | | | AC027105, AC026488, AC072051, AL157766, AL355312, AC022950, |
| | | | | | AC068519, AL356441, AC027234, AC025899, AC010761, AC010761, |
| | | | | | AL354924, AP001787, AC025425, AL353139, AC023968, AL354657, |
| | | | | | AC009868, AC013758, AC006512, AC006512, and AC006512. |
| HPTTL53 | 82 | 526246 | 1-275 | 15-289 | AC000378, AP002495, and AP002495. |
| HPTTR23 | 83 | 519899 | 1-363 | 15-377 | |
| HPTTU76 | 84 | 771294 | 1-214 | 15-228 | AJ012611, AF049339, AF092047, AF083891, D83145, X90871, Y15106, |
| | | | | | AC012354, AC012354, AC012354, AC016841, AC016841, and AC016841. |
| HPTVA78 | 85 | 575989 | 1-397 | 15-411 | |
| HPTVC63 | 86 | 576794 | 1-429 | 15-443 | AI130878, AW206602, AA693360, AI962237, AW197213, AI990578, |
| | | | | | AA551509, AI305766, AA652057, AA649642, AA125788, AA342901, |
| | | | | | AI312259, AA601892, AI205126, AI547286, AA350859, AA077817, |
| | | | | | AA828696, AA826032, N43757, AA515938, AA100489, AA450199, F31204, |
| | | | | | AI921649, AA653057, AI376100, AW074059, AI356904, AI922654, |
| | | | | | AI564284, AI570138, AI648558, T07346, AI886176, N66026, AA553465, |
| | | | | | AA515128, F37286, AA843450, AW193265, R93006, N73515, T62712, |
| | | | | | AI282832, AW074398, W25284, AA320977, H55859, AA658235, |
| | | | | | AA340003, AW302309, T06064, AI214510, AI357551, AA348859, |
| | | | | | AW117750, W38648, AW274101, N71724, F19258, AW238325, AI003172, |
| | | | | | AI015318, F24284, AW340844, T06556, F36373, N87410, AA243452, |
| | | | | | AI350211, AW193432, AI453383, T29360, AA228329, AI349874, AI445516, |
| | | | | | T07451, AA605274, AI879000, AA218645, AI284640, AA878140, W60516, |
| | | | | | AA318652, AA365347, W07032, AL045455, AI079667, AA355281, |
| | | | | | AI802526, AW104748, T64131, T25706, AI469003, AI471481, AL046409, |
| | | | | | R44592, F18974, R13151, AA515051, AA229785, AI339850, AI133164, |
| | | | | | T12272, F36273, T59223, AA932099, AI370650, AL138265, AW131034, |
| | | | | | AI859251, AA581342, AI697353, AI688846, AI431303, AA581903, |
| | | | | | AA021133, AI708009, T57154, T59264, AA252763, AA743956, AW088202, |
| | | | | | AA602069, AW103383, AI536555, AI266576, AI149915, AA856981, |
| | | | | | AL041368, AI908069, AI922840, AW247132, AI003743, AI610159, |
| | | | | | AI282907, AA225201, AA578154, AW261871, AA501722, AW276827, |
| | | | | | T57687, AI061334, N69962, AI929531, AA384502, AA557325, AA076632, |
| | | | | | AA580889, AI633007, AI951889, AA161095, AA598586, AW162049, |
| | | | | | AI053672, AW419118, AA443065, AL040462, AW102955, Z96498, Z96641, |
| | | | | | AC005745, M87918, AC007666, U63312, AC007999, AF146191, AC005899, |
| | | | | | AL109985, AP000855, AC006296, L48038, AL031391, AC004938, |
| | | | | | AL031594, AC000026, AC005332, AC005792, AC005866, AC006539, |
| | | | | | AB020865, AC008249, AL024507, AC004821, AC007304, AL031282, |
| | | | | | Z97198, AL078638, AL049557, AL031224, AL031846, AL121934, |
| | | | | | AL031602, AC003950, AL109627, AC005908, AC004633, X13921, |
| | | | | | AC006125, M62424, AR025392, AC002302, AC003101, AL121825, |
| | | | | | AC007917, U52111, I51997, AP001053, U29953, AP001039, AC003982, |
| | | | | | AC004983, AP000358, AC007565, AC000086, AC005681, AC006120, |
| | | | | | X88791, Z82189, Z49816, AL031722, AC004712, AC004592, AL033381, |
| | | | | | Z86062, AL021391, AP000497, M33940, AL049869, AL021786, AL021393, |
| | | | | | AL049613, AC004841, AJ003147, AC004002, AL121603, AP000252, |
| | | | | | AC004506, AC004771, AP000134, AP000212, AP000031, AC002059, |
| | | | | | AC004955, AC005184, AC007955, AL049832, AC006057, AL133355, |
| | | | | | AC001050, Z95115, AL049757, AC007970, AL109837, AC007320, |
| | | | | | AC006571, AC005064, AF015171, Z92540, U67221, AC005971, AF019664, |
| | | | | | AC004903, AL008633, AL035460, AC004911, AC006992, AC005562, |
| | | | | | AR036572, U14698, AC004859, AC005369, AL133382, AC006030, |
| | | | | | AC005091, AL117353, AL109842, AL034400, AC007226, AF015169, |
| | | | | | AC005245, AC005553, AF085440, AF085442, AF085444, AP000126, |
| | | | | | AP000204, AB010492, U18398, AC004623, AC006950, AC008984, |
| | | | | | AF129077, AF035397, AC006208, AC010175, AC004542, AL049765, |
| | | | | | AC007680, AF165147, AC003081, AL021877, AL080243, AC007450, |
| | | | | | U57007, AC002550, AC004611, AF125348, AF031078, AF030876, Z99128, |
| | | | | | AC004984, U57009, AC006211, U67208, AP000244, AL031432, AL023755, |
| | | | | | Z65382, AF106656, Z82190, AC005206, AP000011, AL009050, AC004559, |
| | | | | | AL133245, AL008728, AC007551, AF015162, AJ250235, AC004232, |
| | | | | | AC002996, AC005043, AC007546, AC005510, AC005544, AF190465, |
| | | | | | AC004876, AP000966, AC006556, X04981, X71874, AL049764, AC004159, |
| | | | | | AL022326, Z84483, Z94055, AC005521, AL022576, AL034551, AC005177, |
| | | | | | AC007436, AL009177, AL022170, AL050318, U02507, AL132642, U47924, |
| | | | | | AB023049, AC006249, U89335, U89336, AC007038, AC006359, AL020994, |
| | | | | | Z98049, Z84470, AL034548, AC006948, AC004385, AL117340, AF109907, |
| | | | | | AC002070, AF140763, Z98256, U95740, AF015166, AC002041, AF078904, |
| | | | | | Y14768, AP000505, AL035443, AP000343, AC009510, AL022574, |
| | | | | | AC007050, U95742, Y11107, AF064724, AL121694, AC005393, U07000, |
| | | | | | U18396, AC004637, AC003006, AL023807, Z98258, AC023008, L48038, |
| | | | | | and AC016771. |
| HPTVD46 | 87 | 575986 | 1-425 | 15-439 | |
| HPTVF33 | 88 | 929663 | 1-349 | 15-363 | AI819851, AI375187, AI805720, AI312775, AA733074, AI312779, |
| | | | | | AI740753, AI683950, T98091, AI097608, AI078550, AI524822, AI469346, |
| | | | | | AI042059, AI247277, AA604862, AI633056, AA583309, W88995, and |
| | | | | | AI684618. |
| HPTVF92 | 89 | 800383 | 1-362 | 15-376 | |
| HPTVI60 | 90 | 575971 | 1-220 | 15-234 | D81923, and AI863347. |
| HPTVJ51 | 91 | 724992 | 1-385 | 15-399 | AC009309, and AC009309. |
| HPTVK12 | 92 | 970825 | 1-276 | 15-290 | |
| HPTVP65 | 93 | 575973 | 1-338 | 15-352 | |
| HPTVQ26 | 94 | 867345 | 1-540 | 15-554 | AI939423, AI494286, AI201810, and AI871046. |
| HPTVV37 | 95 | 576733 | 1-386 | 15-400 | AC013591, and AC013591. |
| HPTWA13 | 96 | 975009 | 1-665 | 15-679 | D80043, D59889, D59275, C14331, D58283, D59502, D80022, D80164, |
| | | | | | D80195, D80188, D59467, D59619, D80210, D80166, D14389, D80240, |
| | | | | | D80391, D51423, D51799, D80253, D80227, D59859, AA305409, D80212, |
| | | | | | C15076, D80219, D80196, D59787, D81030, D59927, C14429, D57483, |
| | | | | | D80269, D80038, D80193, D59610, D80024, D80366, D50979, D51060, |
| | | | | | D50995, D80378, T03269, D80045, D80241, C14014, AW178893, C75259, |
| | | | | | AW367950, D51022, AW177440, D80251, AW179328, AA305578, |
| | | | | | AW378532, D81026, AA514188, D80248, AW369651, D80522, AA514186, |
| | | | | | AW178775, D59695, D80134, D51250, AW360811, D88547, A62298, |
| | | | | | A62300, AJ132110, A84916, AR018138, AC003950, AC007878, AC006369, |
| | | | | | A67220, AF058696, X67155, AR008278, AL031276, AC005331, Y17188, |
| | | | | | D26022, A25909, D89785, and A78862. |
| HPTWF25 | 97 | 577120 | 1-419 | 15-433 | |
| HPTWG27 | 98 | 506242 | 1-434 | 15-448 | H52572, AF096168, and AF096169. |
| HPTXE41 | 99 | 711991 | 1-388 | 15-402 | AA371675, D80195, D80248, C14389, D59467, D80164, D59275, D80227, |
| | | | | | D59502, AA305578, C15076, AA514188, D58283, D81026, D50979, |
| | | | | | D59859, D80022, C14331, D80166, D80043, D51423, D59619, D80210, |
| | | | | | D51799, D80391, D80240, D80253, D59787, D80038, D81030, AA514186, |
| | | | | | D80269, D80188, D80212, D80193, D80196, D80045, D80219, D59927, |
| | | | | | D80302, D57483, D59610, C14014, D80378, AA305409, D51022, D80366, |
| | | | | | D80522, D59889, D50995, D80024, AW360811, D80133, AW177440, |
| | | | | | D80251, D80241, D51060, C14429, AW178893, AW375405, D80268, |
| | | | | | D80439, T03269, AW377671, C75259, AW179328, AW366296, AW360844, |
| | | | | | AW360817, AW375406, AW378534, AW179332, AW377672, AW179023, |
| | | | | | AW178905, D80247, AW378532, AW178906, D80132, AW177501, |
| | | | | | AW177511, C05695, AW352171, AW377676, D80134, AW352170, |
| | | | | | AW177731, AW178907, AW178762, AW179019, AW179024, D58253, |
| | | | | | D59373, D51250, D51103, AW369651, AW177505, AW360841, AW179020, |
| | | | | | AW178775, AW178909, AW177456, AW179329, D51759, AW367967, |
| | | | | | AW178980, D52291, AW177733, AW378528, AW178908, AW178754, |
| | | | | | AW179018, AW352158, AW352117, D80157, D80949, F13647, AW176467, |
| | | | | | D59695, T11417, AW352174, AW179004, AW179012, AW178914, |
| | | | | | AW378525, D80168, AW352163, AW178983, C06015, C14227, D59503, |
| | | | | | AI910186, AW179009, AW177728, AW178774, AW178911, T48593, |
| | | | | | AW378543, AW177722, D81111, D58246, C14298, D80064, C14407, |
| | | | | | AI905856, D59627, AW352120, D80258, AW178781, D59653, AW177723, |
| | | | | | AW360834, D58101, D45260, AW378540, AA809122, D59317, AW367950, |
| | | | | | Z21582, AI535850, H67854, C03092, AW378533, H67866, AI525923, |
| | | | | | D51097, AW177508, D51213, D45273, T03116, AW178986, AA285331, |
| | | | | | AW177497, AI525917, AA514184, D80014, C14973, AW177734, AI525227, |
| | | | | | AI557751, C14344, AI535686, D51221, D59474, D59551, D60010, |
| | | | | | AI525920, D60214, T03048, AI557774, C14957, C14046, AI525912, |
| | | | | | AI525242, AI525235, C16955, AI525928, AI525925, AW378542, AI525215, |
| | | | | | AW378539, C05763, Z33452, T02974, AI525237, AI525222, AW360855, |
| | | | | | T02868, C13958, D31458, H67858, C04682, AC007193, AF079147, |
| | | | | | AF060194, AB028859, AJ132110, A84916, AR008278, A62300, A62298, |
| | | | | | AR018138, AF058696, A82595, X67155, Y17188, D26022, Y12724, A25909, |
| | | | | | A94995, A67220, D89785, A78862, D34614, AR060385, AB002449, |
| | | | | | D88547, AR008443, AR016808, I82448, X82626, I50126, I50132, I50128, |
| | | | | | I50133, AR066488, AR016514, AR025207, AR060138, A45456, A26615, |
| | | | | | AR052274, AR066490, Y09669, A43192, A43190, AR038669, I14842, |
| | | | | | AR066487, I18367, A30438, AR054175, D50010, Y17187, A63261, |
| | | | | | AB012117, AR008277, AR008281, AR008408, X68127, A70867, AR062872, |
| | | | | | AR016691, AR016690, U46128, A85396, D13509, D88507, AR066482, |
| | | | | | I79511, A44171, A64136, A68321, AR060133, A85477, I19525, A86792, |
| | | | | | X93549, U79457, AF123263, AR032065, and AR008382. |
| HPTXN72 | 100 | 761488 | 1-368 | 15-382 | W42637. |
| HPTZA59 | 101 | 871383 | 1-331 | 15-345 | AC008149. |
| HPTZB44 | 102 | 573273 | 1-296 | 15-310 | |
| HPYAA23 | 103 | 592397 | 1-262 | 15-276 | AA372054, and AA372052. |
| HTNBR88 | 104 | 519756 | 1-406 | 15-420 | AA385771, AA385801, and AA385501. |
| HWESE66 | 105 | 835990 | 1-394 | 15-408 | AI754880, AI055880, AA010180, AI858528, W47181, AI684309, |
| | | | | | AA904474, AA709400, AI146877, AA679562, AI346892, AI022641, |
| | | | | | AW268372, AI347458, AI695528, AI561128, AI559674, AW342023, |
| | | | | | AI591023, AI283791, AI917970, AI269415, AI581366, AI520848, AI590052, |
| | | | | | AA137241, AI570052, AI589103, W72378, AI052720, N34489, AA742699, |
| | | | | | AA155860, AA679131, AI051932, AA535026, N56966, AA603715, N70295, |
| | | | | | AI085415, AA745724, N98218, AA702660, T34619, AI569359, AA173550, |
| | | | | | R26883, W92131, W69571, R53535, AI243048, AA047421, AI264380, |
| | | | | | AA846650, Z39688, AI247762, AL047554, F09854, AA923128, AI373723, |
| | | | | | AA402012, H97147, AA677718, N34912, AI129414, T66302, AW337603, |
| | | | | | AI364435, R27387, F09759, AA503143, AA932016, H87451, AA872255, |
| | | | | | N34917, D62672, R25391, AI535628, H56026, H12611, R41448, T34620, |
| | | | | | R79219, H03331, T56562, N30513, AA301957, T29938, F02552, W74088, |
| | | | | | R67036, R78544, AA302010, AA064865, AA894961, AA149295, |
| | | | | | AA010179, AI623954, H99353, and AL049367. |
| HWESA01 | 106 | 915173 | 1-598 | 15-612 | AI127263, AA045848, AA463247, AI699904, AA631393, AL045327, |
| | | | | | AL135012, AL134524, AL045328, AL045891, U46344, AL042655, |
| | | | | | AL042898, AL047163, AL047611, AL043089, AL043321, AL042523, |
| | | | | | AL042508, AL042420, AL042931, AL042802, AL042488, AL046356, |
| | | | | | AL134110, AL045494, AL042515, AI432644, AL042741, AI623302, |
| | | | | | AI431307, AI431316, AI431238, AL043091, AL042533, AI432666, |
| | | | | | AL041862, AL043278, AL043239, AL043166, AI431315, AL047092, |
| | | | | | AL042853, AL042729, AL043295, AL040207, AL042842, AI432653, |
| | | | | | AI431323, AI431321, AW081103, AI431246, AL042787, AI432650, |
| | | | | | AL042832, AL043196, AI440238, AL047675, AL042519, AI285439, |
| | | | | | AI872315, AW151107, AI889191, AI432654, AI866784, AI440260, |
| | | | | | AW058275, AI927233, AI539260, AI866465, AI815232, AI801325, |
| | | | | | AI866691, AI500523, AI538850, AI887775, AI582932, AI590043, AI923989, |
| | | | | | AI284517, AI872423, AI500706, AI445237, AI491776, AI289791, AI926593, |
| | | | | | AW151138, AI889189, AI521560, AW151974, AI500662, AI285417, |
| | | | | | AI582912, AI284509, AW172723, AI539800, AI440263, AI538885, |
| | | | | | AI889168, AI866573, AI633493, AI434256, AI866469, AI805769, AI434242, |
| | | | | | AI888661, AI500714, AI284513, AI888118, AI859991, AI436429, AI355779, |
| | | | | | AI889147, AI623736, AI581033, AI371228, AI491710, AI440252, AI567971, |
| | | | | | AI866786, AI860003, AI610557, AI242736, AI828574, AI887499, AI539781, |
| | | | | | AI702065, AI539707, AI885949, AI285419, AW089557, AI559957, |
| | | | | | AI521571, AI469775, AI866581, AW074057, AI567953, AI815150, |
| | | | | | AI446495, AI867068, AI952433, AI225248, AI358271, AI890472, AI798359, |
| | | | | | AI282249, AI698352, AI924051, AI371229, AI815239, AI500659, AI354431, |
| | | | | | AI932620, AI804505, AL042745, AI499508, AI432656, AI431235, |
| | | | | | AW194509, AI371237, AW151979, AI469764, AI355008, AI866458, |
| | | | | | AI567954, AI475298, AI499543, AI521228, AI371251, AI866510, AI494201, |
| | | | | | AI866461, AI923046, AI537677, AI955221, AL042468, AW151132, |
| | | | | | AI804524, AI539771, AI867066, AL040844, AI963849, AI500518, |
| | | | | | AI362391, AW151136, AI624681, AI561170, AI289386, AI690946, |
| | | | | | AL047422, AI648567, AI433157, AL048403, AI963852, AI924024, |
| | | | | | AI440261, AL047398, AI499555, AI872307, AI801286, AL042551, |
| | | | | | AI371243, AI922443, AL039390, AI890907, AI682915, AI049859, |
| | | | | | AI362494, AI440236, AI431230, AI249936, AI355017, AW193598, |
| | | | | | AI582910, AI539863, AI366900, AI559976, AL039287, AW151131, |
| | | | | | AL042944, AI366910, AI499481, AI355126, AI474699, AI561177, |
| | | | | | AI885920, AI888022, AI582926, AI687588, AI567947, AL133053, |
| | | | | | AL122101, AL133049, AL133074, A85203, AR066494, AL133076, Y17793, |
| | | | | | AL133082, AL133068, U30290, AL133655, E13998, AL133051, AL133084, |
| | | | | | AL133070, AL049423, and AF019249. |
| HTNBY41 | 107 | 747239 | 1-557 | 15-571 | AI762013, AA526957, AA568696, AI924342, AI493735, AI554683, |
| | | | | | AI130892, AI268432, AA948397, AI283224, N66675, AI089333, AI281052, |
| | | | | | R74351, AI041046, AI159754, AI554925, AI808661, AI240373, AI306401, |
| | | | | | AI432137, AI186176, AI028031, AI805110, AI159952, W56521, AI760725, |
| | | | | | AA829854, AI350369, AA455228, W94060, AI493996, AA255910, |
| | | | | | AI097018, N95421, AA256942, AI262018, AI272677, AI246364, AA477541, |
| | | | | | AI188840, R81399, AA452602, AA723446, AI366765, AI472965, W56802, |
| | | | | | AA281554, AW082388, AI433739, AA737534, AI355774, AA724288, |
| | | | | | AA521272, AA521332, AA651898, AA057778, AA830611, W58399, |
| | | | | | AA521328, AA835745, AA281553, N21151, AA827753, AA010776, |
| | | | | | AA011056, AA836373, AI864184, AA385911, H92168, R85733, H38827, |
| | | | | | AA827152, AA911004, N98980, AA768495, AA334980, AA280037, |
| | | | | | AA832185, AA749182, AA256023, N93694, AA382665, W94059, AI280912, |
| | | | | | AA059066, AA331724, AA465606, AA047775, AA570409, W25038, |
| | | | | | AA835003, H78635, T80927, W37606, AA767270, AI268075, AA404580, |
| | | | | | R76494, AL050189, AC021329, AC027116, and AC027116. |
| HTNBX31 | 108 | 698438 | 1-415 | 15-429 | R46264, AW451566, AW299739, and AA385770. |
| HTNBT32 | 109 | 702974 | 1-488 | 15-502 | W75971, AA921694, AW131123, AI356689, N62313, AA385610, AI806330, |
| | | | | | AI078158, AA805737, AA722467, AI128185, AI680739, AI082668, |
| | | | | | AI222928, AA730121, and AL049611. |
| HTNBO63 | 110 | 968238 | 1-562 | 15-576 | AA429712, H50880, W76129, AA476789, AA047706, AA643509, |
| | | | | | AA523212, AA523202, T81543, AA528130, AA835106, W79789, T48131, |
| | | | | | T85253, AA056226, N32472, C18333, N30476, AA381035, N40625, |
| | | | | | AI371736, AI127959, H29973, N36274, R39425, AA385329, R50281, |
| | | | | | AA282699, W07560, H26671, AA443740, AA836085, AA778023, |
| | | | | | AA054478, AA865485, AA595913, AA620932, R73250, T53068, AI500352, |
| | | | | | AA047673, AA335573, AA335916, AI079128, AI146658, AA335959, |
| | | | | | AA603145, AA187422, AI066536, AA804977, F22831, H20978, T78853, |
| | | | | | AI422801, H21022, H01955, AA598695, AA613296, W74335, N29349, |
| | | | | | AI422812, AI142733, AA845592, AA620949, AI015893, AA044320, |
| | | | | | T55080, AI017321, AA058431, AA765081, H50881, N23312, AA044239, |
| | | | | | AA381057, AA358392, W42662, W72874, AA315073, T47661, AA341385, |
| | | | | | T53069, AA120814, T48132, N95172, H26619, AA160834, AI193923, |
| | | | | | N57047, F31834, AI284661, AI862987, AA564172, H29876, AA358391, |
| | | | | | AA809697, N21256, AA622185, AA730107, AA774150, AA468649, |
| | | | | | AA745072, AA812884, AA938344, AA760732, AI014883, AA989404, |
| | | | | | AA877913, AA588122, AA782772, AA027352, AI187081, N80774, |
| | | | | | AA056227, AA996104, AA872495, T47662, AA187612, T81971, AI300651, |
| | | | | | AI193246, AA160246, AA056753, AI349303, AW169720, AA581252, |
| | | | | | AA844999, AA737566, AA845424, AI267922, AA760885, AA531612, |
| | | | | | AI933233, AA082532, AA810539, AI928743, AI000313, T54913, |
| | | | | | AA442742, and AW023592. |
| HTNBO21 | 111 | 870052 | 1-892 | 15-906 | AA385323, AW084748, AA608612, AA608588, AA601503, AL138254, |
| | | | | | AA311156, AA669616, AA577719, T60544, AA573207, AL041013, |
| | | | | | AA642787, AW440545, AW102811, AI817516, AL043745, T57774, |
| | | | | | AA323343, H45136, U51704, N27362, AA287618, AA552468, AA728812, |
| | | | | | AI799327, AA634252, AL040521, AA491951, AA284247, AW405593, |
| | | | | | AL044438, AA847333, AA484143, AI284583, AA019793, AL037910, |
| | | | | | AL044000, AA084927, AI810236, AW188427, AA126635, AW265073, |
| | | | | | Z84469, AC004821, AC004686, Z98304, AF047825, AC004812, AC004841, |
| | | | | | AC020663, AC007637, AC004491, AL049636, AC005089, AL049780, |
| | | | | | AL139054, AL022476, AF053356, AC005102, AC005520, AL022238, |
| | | | | | AC004816, AC005920, AC005874, AF134471, AP000240, AC004638, |
| | | | | | AC004983, Z85986, AC004929, U91323, U52112, AL022313, AC004832, |
| | | | | | AL008583, AC005488, AC005015, AL034429, AE000658, AL080243, |
| | | | | | AC005972, AC004228, AC004125, AC006211, AC002350, Z97054, |
| | | | | | AC007227, AJ003147, AC005632, AC002126, AC005409, AP000212, |
| | | | | | AL049843, AC005399, AC005971, U91321, AL031311, AC002036, |
| | | | | | AC005412, AC005288, AC002996, Z84480, AC002312, AC007845, |
| | | | | | AL022165, AC005800, AL049569, AL121652, AL035072, Z93023, |
| | | | | | AC007055, AC006254, AC005081, AC007546, AL031432, AC004859, |
| | | | | | AC004551, AC004985, U47924, AC005529, AL078638, Z98200, AP000952, |
| | | | | | AL049576, AL050307, AC005280, Z84466, AC005911, AC002300, |
| | | | | | AC004659, AC004033, AC004887, AC006014, AC007676, U85195, |
| | | | | | AC004813, AL031733, AL034548, Z98051, AL008729, AC005193, |
| | | | | | AF001549, Z82203, AF139813, AL031005, AC005696, AC002059, |
| | | | | | AC000353, AL031681, AF196969, AC005620, AP000514, AL133445, |
| | | | | | AC002563, AC002477, AC004685, AL050318, AL022315, AL021878, |
| | | | | | AL034420, AC003982, AP000555, AP000501, AL049874, AC006241, |
| | | | | | AC004167, AF030453, AC004895, AL133245, AC005484, AC006480, |
| | | | | | AC004408, AC004876, AC006013, AL096791, Z85987, AC005722, Z93244, |
| | | | | | Z99716, AC005088, AC006270, AF205588, AP000350, U91318, AL031685, |
| | | | | | AL121653, AC005839, AP000251, AC006261, AP000115, AC005725, |
| | | | | | AF134726, AF111168, AL034417, AC006441, AC007551, AC002425, |
| | | | | | AL133448, L44140, AC004921, AC002470, AL109759, AC002472, |
| | | | | | AL049776, AL031985, AC000379, AC006285, AC007041, AC005899, |
| | | | | | AC009247, AC006537, AC005071, AC002302, U62293, AC004382, |
| | | | | | AC016025, AC002492, AC004752, AC006023, AL109758, AL009181, |
| | | | | | AC007666, AC005527, AC005902, AC009509, AC006121, AC005291, |
| | | | | | M89651, AC005082, AP000030, AL035495, AL049761, AC004883, |
| | | | | | AC011331, AC004858, AC007225, AC005859, AC005822, L78810, |
| | | | | | AC003043, AP000466, AC006111, AC006312, AL049713, AC004019, |
| | | | | | AC003684, AC006511, AL133163, AL023575, AL109623, AC002365, |
| | | | | | AL035415, AC000026, AC005225, AC004963, AC004196, AC004953, |
| | | | | | AC009248, AL022318, AL024498, AL022316, AP000697, AC005803, |
| | | | | | AL035045, AL008721, AC006581, AC004216, AC002544, AC007182, |
| | | | | | AC006257, AC005513, AC018769, AC005049, AC002091, AC007376, |
| | | | | | AC005921, AL031587, L78833, AC007263, AC004765, AF003626, |
| | | | | | AP000511, Z84486, AL109963, AL008726, AC005231, D87675, L34079, |
| | | | | | AD000092, and AL022322. |
| HTNBN03 | 112 | 960877 | 1-584 | 15-598 | AI270370, AA385003, AA904211, AW081303, AI798493, AI733856, |
| | | | | | AI042021, AL120282, AW167330, AI277783, AI811653, AI583291, |
| | | | | | AI755214, AI754567, AI038304, AI249688, T57767, AI744830, AI017251, |
| | | | | | AI732789, AW131356, AI754105, AI569100, AA053463, AI469599, |
| | | | | | AI984118, AA773463, AI889696, AW192599, AI133083, AI268019, |
| | | | | | AA833875, AA833896, AA975779, AI679759, AI080307, H63390, |
| | | | | | AI635175, AA565232, H73550, AI380617, AI362442, AI858864, H58653, |
| | | | | | AI690497, AI701053, AI569591, AI989408, AI821355, AI653493, |
| | | | | | AW388815, AL042667, AL042670, AA565319, H68343, AA828637, |
| | | | | | AI250552, AI284543, N54301, AI627168, AI432298, N67313, AI635440, |
| | | | | | AI598003, H69089, AW004884, AW051819, AW167154, AI254770, |
| | | | | | AW388886, AI276298, AI251284, AI251034, AI251203, AI249853, |
| | | | | | AI077941, AA630535, AA381754, AI889995, AA298789, AI188390, |
| | | | | | AI433131, AW088049, R83708, AW117740, AW338179, AI859280, |
| | | | | | AI354333, AI251576, AC005261, AC008372, AC005082, AC004216, |
| | | | | | AC006948, AC004686, AC006475, AL049776, AC007707, AC007263, |
| | | | | | AC007664, AL008635, U50871, AL031283, Z98304, U91323, AF205588, |
| | | | | | AC005881, AC004841, AC003108, AF095901, AL109627, AC006121, |
| | | | | | AC006441, AC004253, AL122020, AC004796, AL034420, AF196972, |
| | | | | | AC005399, AJ003147, Z84467, AC006241, AC005594, AL049775, |
| | | | | | AC003950, L78833, AL139054, Z94055, AL133445, AL078581, AL133163, |
| | | | | | AP001052, AC002472, AC007546, AC004099, AL035422, AC004815, |
| | | | | | AL034423, AL031848, AC005291, AF111168, AC005778, AC007227, |
| | | | | | AC005006, AC006011, AC002350, AL021579, AC005529, AP000356, |
| | | | | | AC002316, AC005244, Z97056, AL049869, AC005630, AC002404, |
| | | | | | AL049653, AC005069, AL109759, AC006088, Z93023, AC005280, |
| | | | | | AC004805, AL031584, AL050318, AL109865, Z95116, AC005004, |
| | | | | | AL024498, AL049780, AC005480, AC005086, AL035071, AC008018, |
| | | | | | AC006536, AC003043, AP000359, AF060568, AC007221, AC004813, |
| | | | | | AC006023, U78027, AC005736, AC004158, AL035415, AC004973, |
| | | | | | AL020997, AC005632, AL049745, AL031597, AF134726, AC006530, |
| | | | | | AC004531, Z83840, AB001523, AC000025, AC007225, AC005048, |
| | | | | | AL136295, AL008718, AC006084, AC005527, AC002477, Z85994, |
| | | | | | AC005932, AC005544, AC004820, AC001234, AC005015, AC002351, |
| | | | | | Z83844, AL033527, AC005295, AC002549, AL022318, AC004067, |
| | | | | | AC004659, AP000008, AC007066, AL049539, AC002045, AL133245, |
| | | | | | AC007388, AC007842, AF207550, AP000704, AC003006, AF024533, |
| | | | | | AF196779, AC007421, AC005871, AF001550, AC007666, AC005225, |
| | | | | | AC006958, AP000066, AC006328, AL009181, AL133353, AC004526, |
| | | | | | AL078593, AC004491, AC003982, AC007052, AC004991, AC005899, |
| | | | | | AC007327, AL133246, AL109628, AC004963, AC016831, AL121595, |
| | | | | | AL133448, AC000085, AC006211, Z99716, AC004983, AL121603, |
| | | | | | AC005255, AL132777, Z98742, AP000506, Z85987, AC004890, U47924, |
| | | | | | AP000355, AC006299, AC007065, AC004150, AL117337, AL022069, |
| | | | | | AC002369, AC004967, AC006511, AL020993, AL096761, AP000114, |
| | | | | | AP000046, AL096710, AC005829, AC004382, AC004594, AL096701, |
| | | | | | AC005102, AC004985, AC004019, AL034548, AC006449, AL034379, |
| | | | | | AL031670, AL035089, AL022312, AC002425, U52112, AF165926, |
| | | | | | AC000086, AC005071, AF111167, AC006480, Z84480, AC007773, |
| | | | | | AB000882, Z98950, AC012384, AC007298, AC003682, AC005872, |
| | | | | | AC004000, AL031005, AC005189, AC003037, AP000033, AC002312, |
| | | | | | AC006111, AL034429, AC007055, AC008132, AL022238, AL049743, |
| | | | | | AC004990, AC007425, AD000684, AL022396, AL121652, AF109907, |
| | | | | | AP000556, AL022313, AC007938, AL133243, AC005920, AF031078, |
| | | | | | AC005091, AC005081, AC005088, AL021546, U91326, Y10196, AL021808, |
| | | | | | and Z96074. |
| HTNBE16 | 113 | 667653 | 1-564 | 15-578 | N59452, N71841, AA384945, AA610644, AA640305, AA262079, |
| | | | | | AA661583, AI299445, AI570067, AA723132, AA730530, AA669238, |
| | | | | | AA831426, AI268818, AA715848, AA639040, AA056619, AI090377, |
| | | | | | AW275432, F18885, AI457152, AI567676, AI363762, AL022149, |
| | | | | | AC005618, AC004534, Y14768, AP000505, AF011889, AC005585, |
| | | | | | AC007227, Z97632, AL035690, AC006369, AC005529, AL031846, |
| | | | | | AC005690, AC000115, AC005011, AC004913, AC006597, AC004796, |
| | | | | | AL096701, AL022333, AC003665, AL034400, AP000512, AL034421, |
| | | | | | AC005808, AL121603, AC004655, AB001523, AC007371, AC003982, |
| | | | | | AC007253, AC005209, U80017, AC004150, AB023051, AP000348, |
| | | | | | AC007057, AC005900, AC004929, AC005632, AL031311, Z93017, |
| | | | | | AC004477, AC005037, AL035668, AL035405, AC002364, AL080243, |
| | | | | | U95739, AC005031, AC005755, AC000118, AP000557, AC004895, |
| | | | | | AC006539, AP000556, AC004019, AF001550, U85195, AC004106, |
| | | | | | AC005625, AC004835, AC007066, AC005180, Z98946, AE000658, |
| | | | | | AC005696, AC004601, U95740, Z96810, AC007842, AL035423, AC005164, |
| | | | | | AC005911, AC002060, AC005971, AL023574, AC005913, AL022163, |
| | | | | | AC003007, AL122020, AF165926, AC005206, AL049872, AL022336, |
| | | | | | AC004702, AC005339, AL109758, AC007386, AC007993, AL022313, |
| | | | | | AF134726, AC012099, AL109952, AL022165, AC006511, AC005667, |
| | | | | | AC002357, AC005730, AC005740, AC002429, AC020663, AJ003147, |
| | | | | | AL050321, AL133448, AC000353, AC006026, AL024474, AL024498, |
| | | | | | Z98742, AC005231, AC004686, AC004953, AC006088, AF003529, |
| | | | | | AC004020, AC005839, AC004024, AL034402, AF064861, AC007676, |
| | | | | | AL121653, AC006480, AC003102, AL021578, AC005527, AC008072, |
| | | | | | AL022721, AC004967, AC005412, AL049699, AF176815, AC005722, |
| | | | | | AC005606, AF015262, AC004659, AP000045, AP000113, Z93241, |
| | | | | | AC004703, AJ229043, AP000466, AL008712, AL021155, AC002477, |
| | | | | | AL035445, AC005015, AL020997, Z49918, Z93244, AF139813, AC007226, |
| | | | | | AP000350, AC004552, and AL031587. |
| HTNAU71 | 114 | 764772 | 1-623 | 15-637 | AA069788, AW270994, AI343000, AA384776, AW241650, AA248857, and |
| | | | | | T05558. |
| HTNAP60 | 115 | 742363 | 1-439 | 15-453 | R36505, AA384660, R23951, AI743588, and W74438. |
| HTNAO91 | 116 | 790479 | 1-521 | 15-535 | T81131, AA384648, and R69706. |
| HTNAO78 | 117 | 773906 | 1-465 | 15-479 | W90600, AA454156, AI885012, AI123537, AI375666, AI677691, AI142746, |
| | | | | | AA937091, AI222443, N94427, AI679444, AI679953, AA976648, |
| | | | | | AA825420, AI283627, AA875834, AA808717, AA806546, AI039791, |
| | | | | | AI245486, AA971741, AA181978, AI570550, AA384641, AI424398, |
| | | | | | AA187705, and AC006312. |
| HTNAO10 | 118 | 582652 | 1-494 | 15-508 | |
| HTNAM62 | 119 | 742407 | 1-361 | 15-375 | AA384573, and H47982. |
| HTNAM36 | 120 | 708319 | 1-454 | 15-468 | T70154, T79050, and AA384527. |
| HTNAM05 | 121 | 932848 | 1-478 | 15-492 | AA384511, AI954709, AI636541, W67961, AI203357, AW262703, and |
| | | | | | AA927414. |
| HTNAC78 | 122 | 772786 | 1-447 | 15-461 | AI370971, AI276259, AA736452, AI370982, AA084399, R51600, |
| | | | | | AA968610, R37872, R54576, Z78383, AA383924, and AA665427. |
| HPYAA82 | 123 | 781551 | 1-173 | 15-187 | N36540, AI681283, AI703083, AI298425, AW408061, and AA372014. |
| HPYAA77 | 124 | 591652 | 1-381 | 15-395 | AA371865, AI280748, and AI915471. |
| HPYAA44 | 125 | 503594 | 1-544 | 15-558 | AA371859, AA371860, and AC007319. |
| HPTTK64 | 126 | 893859 | 1-553 | 15-567 | AI208352, AA426398, AA890119, AI766401, AI698605, and AC004126. |
| HPTSJ47 | 127 | 720643 | 1-739 | 15-753 | AA444397, AA460063, AA459971, AA923289, AA993721, AW137416, |
| | | | | | AW206175, AI370379, AI032809, AW183713, AA371989, AW250552, |
| | | | | | C00891, and AI167868. |
| HPTRX50 | 128 | 577997 | 1-308 | 15-322 | H87202, and T82338. |
| HPTRL10 | 129 | 964781 | 1-721 | 15-735 | AI693322, AA939347, AI699455, AI190324, and AC000159. |
| HPTRG17 | 130 | 867379 | 1-322 | 15-336 | AA566023, AI434696, AL046885, H43183, AI653783, AI819391, AI253376, |
| | | | | | AC006111, AF196779, AP000350, Z94056, AC006597, AC007743, |
| | | | | | AC004796, AC005081, Z95152, AL020997, AL022721, AC004491, |
| | | | | | AC002996, Z93241, AC005921, AL121658, AL109827, AC005841, |
| | | | | | AL021453, AL035423, AL049569, AC002126, AC005231, AL133216, |
| | | | | | AL121825, AC002301, AC006088, AC006057, AL049692, AL022334, |
| | | | | | Z98172, AL035405, AC005632, AC007565, AC005696, AL049829, |
| | | | | | AC002119, AL109952, AC004253, AC006064, AC006312, AB023051, |
| | | | | | AL008726, AL022320, AC009501, and AC006285. |
| HPTRA75 | 131 | 586339 | 1-390 | 15-404 | Z83838. |
| HPDEF87 | 132 | 506557 | 1-296 | 15-310 | AA366844. |
| HPDDZ29 | 133 | 835822 | 1-1159 | 15-1173 | AI828079, AA406124, AI804702, W02398, AI479653, N24994, AW026513, |
| | | | | | AI804681, AI279287, AW071641, AA405225, AI016315, AI565175, |
| | | | | | AI765762, AI336334, N51998, AA554168, AI803621, AA830475, |
| | | | | | AW169248, AI567701, AI815062, AW072075, AA628615, AA804469, |
| | | | | | Z98523, AI376021, AA765004, T16379, AI190526, AI140026, AW236500, |
| | | | | | W80474, AA459939, AA886563, AI702897, AA832320, AI859452, |
| | | | | | AI802165, AA489738, AI378420, H09768, N72572, W80582, W17103, |
| | | | | | AA991446, AA384313, N53439, AL041183, AI670980, T10028, AI968809, |
| | | | | | AA367103, AA733087, N36587, H69659, AW131996, H59101, Z40662, |
| | | | | | AA970416, AW139016, AA700408, T16613, AI968784, AA809953, |
| | | | | | AI738797, N90946, AI468073, AA460027, H70072, N53825, R98090, |
| | | | | | AI952112, AA489635, N41825, H60375, and AB014610. |
| HPDDW82 | 134 | 780234 | 1-352 | 15-366 | T84496, R05327, AA366984, and AL035652. |
| HPDDM95 | 135 | 796713 | 1-283 | 15-297 | T47003, AA366631, AW366733, and AW135461. |
| HPDDM87 | 136 | 466374 | 1-439 | 15-453 | AA366626. |
| HPDDL52 | 137 | 863088 | 1-560 | 15-574 | AW245446, AI572068, AA706549, AI280779, AI679371, AW439535, |
| | | | | | AI033531, AI870982, AA494055, R98055, AI206492, AW016324, AI140510, |
| | | | | | AA443923, AA084768, AA911833, T46976, AI591207, AA444102, R50108, |
| | | | | | AA834837, AW248861, AA348023, AA366535, W23510, AI002841, |
| | | | | | AI523928, and AC005300. |
| HPDDL28 | 138 | 685070 | 1-512 | 15-526 | AA366520, T87290, and Z25055. |
| HPDDK36 | 139 | 708171 | 1-519 | 15-533 | R44204, R44193, AI198118, AA366478, T94406, and T94390. |
| HPDDI10 | 140 | 968674 | 1-460 | 15-474 | AI214154, AA366384, AI905141, R37032, AI905176, and AF039702. |
| HPDCA34 | 141 | 706837 | 1-429 | 15-443 | AI635334, H05641, AA366111, and AL110176. |
| HIATK32 | 142 | 699711 | 1-409 | 15-423 | H03143. |
| HIATG92 | 143 | 584679 | 1-339 | 15-353 | AI524240, AA764850, AC005034, AF001549, AC005229, AC006046, |
| | | | | | AP000073, AC004617, AL022329, AC005004, AL031733, AC005796, |
| | | | | | AC003663, AL109758, AP000500, AL122020, AF196779, AL121653, |
| | | | | | AC006450, AC002994, AC005037, AL096710, AC005736, AL121748, |
| | | | | | AL030996, AC002302, AP000354, U85195, AL022322, AE000658, |
| | | | | | AL139054, AC005212, AC005924, AC007055, AL022238, AC007731, |
| | | | | | Z75741, AC005500, AC007666, AL133163, AC002476, AC006453, |
| | | | | | AL022323, AC002350, AC004595, Z48051, AC003962, AP000356, |
| | | | | | AC004991, AP000248, AC005323, AB026898, AC002425, AL021878, |
| | | | | | AC006162, Z98304, AC006023, AC006597, AC006115, AC004796, Z97832, |
| | | | | | AC005899, AC004234, and AC005740. |
| HIATG60 | 144 | 739690 | 1-370 | 15-384 | W85694, AI936888, and AW294547. |
| HIATG59 | 145 | 739589 | 1-545 | 15-559 | N52976. |
| HIATE16 | 146 | 430767 | 1-319 | 15-333 | AA243804, and AI580773. |
| HIASC20 | 147 | 502760 | 1-350 | 15-364 | |
| HIASC18 | 148 | 502762 | 1-309 | 15-323 | |
| HIABI73 | 149 | 764760 | 1-336 | 15-350 | T47657, and AA349257. |
| HIABG69 | 150 | 793730 | 1-823 | 15-837 | AA236741, U55777, R34965, AA226790, Z78337, AI907737, AI907730, |
| | | | | | AW393482, H82887, AA046561, AI907687, AA349160, AI762983, |
| | | | | | AW205654, T53073, AA412234, AI762523, AI859583, AI676109, |
| | | | | | AA378482, AW248619, AW014935, and AJ132338. |
| HIABF58 | 151 | 857613 | 1-232 | 15-246 | AA348903, AA093983, AI202870, AL120603, and AC002347. |
| HIABA07 | 152 | 894057 | 1-198 | 15-212 | AA348915, AA348916, M20902, AF050154, L13176, AC004985, AC007938, |
| | | | | | AC004031, AC004851, AL121655, AC004841, U91323, AC006538, |
| | | | | | AC005529, AL021878, AC004797, AL031311, AP000346, AF047825, |
| | | | | | AC007314, AL031681, AC006449, AP000305, AC007546, AC006141, |
| | | | | | AC005005, AL096701, L44140, AC003104, AC004882, AC004752, Z85986, |
| | | | | | Z81364, and AF088219. |
| HIAAA75 | 153 | 504344 | 1-176 | 15-190 | AA348867, AA348868, and AL008636. |
| HIAAA49 | 154 | 723338 | 1-476 | 15-490 | AA348859, AA348860, AA486680, AI368873, AL120483, AI816537, |
| | | | | | AI799545, AI671695, AI951863, AW008212, AA496901, AI053790, |
| | | | | | AI925321, R08190, AA744021, AI148446, AA302628, T39598, AI566684, |
| | | | | | AA843120, AA311319, F28204, AA937687, AA102235, AI374809, |
| | | | | | AI802526, AW102955, AA989655, AA654998, AA076632, AA366035, |
| | | | | | C06151, AI160094, AI924251, AL045053, AA714304, N34291, AA716458, |
| | | | | | AA569235, W81292, AA608588, AI687962, AI110760, AW242020, |
| | | | | | AI672135, AL046746, AA563818, AI762764, AI679294, AI282832, T59459, |
| | | | | | AI815583, AA601294, AA845999, AA938105, AI435507, AW406162, |
| | | | | | N71724, AI471543, AI740499, AI886176, AI732120, AW074398, |
| | | | | | AA608710, AA680243, AA225195, AA723287, H94321, AL049742, |
| | | | | | AF196779, AL121655, AP001053, AL034548, AP000355, AL049539, |
| | | | | | AL035072, AL109984, AC000025, AC006241, AC006312, Z82244, |
| | | | | | AC006285, AC016025, AL117258, Z86090, AC002059, AC006948, |
| | | | | | AC004690, Z85987, AC009263, AC003101, AC005822, AC022517, Z95114, |
| | | | | | AL031133, AC005914, AC009044, AC005859, AC004876, AC004685, |
| | | | | | AC006064, AC005081, AC006441, AL022721, AC002470, AL031681, |
| | | | | | AC005527, AL022238, AL031584, AC004526, AL034420, AL034384, |
| | | | | | AC005231, AC005746, AL049745, AC004167, AL133238, AL031685, |
| | | | | | AC007114, AC005778, AL121603, Z98884, AC006480, AC006111, |
| | | | | | AC002303, AC004692, AC005837, AC007676, AC005529, AL009181, |
| | | | | | AC018633, AL031848, AC004643, AC003029, AC007051, AC005971, |
| | | | | | Z99716, AC005940, Z92542, AF111168, AC007919, AC004638, AL031286, |
| | | | | | AF091512, AL121658, AC004263, AC008044, AL132712, AP000042, |
| | | | | | AC004106, AJ003147, AC004983, AC005821, AC004228, AC007542, |
| | | | | | AC005015, AP000557, AC005383, AC005594, AL008723, AF053356, |
| | | | | | AL109865, AC009509, AD000684, AC004686, AL096703, AC005291, |
| | | | | | AC002070, Z93024, AC004491, AC011311, AC005207, AP001172, |
| | | | | | AC005089, AL096701, AC006057, AL022323, AL035249, AC005764, |
| | | | | | AP000252, AL034451, AF015416, AC005229, AC005387, AL035691, |
| | | | | | Z95152, AL021939, AP000010, Z84480, AL096791, AF017257, AC006128, |
| | | | | | AC000159, AC005695, AC005913, AL080242, AC004878, AC005911, |
| | | | | | AL078474, AL022322, AL022476, AC005519, AC005531, AC004813, |
| | | | | | AL110502, AC007253, AC004041, U63721, AC002369, AL049766, |
| | | | | | AL035417, AC005736, AC004834, AC005839, AC004929, AL031005, |
| | | | | | AP000553, AC006449, AC004941, AL035457, AL021154, AP000514, |
| | | | | | AC005043, AC006270, AC007021, AL035683, AF217403, AC004796, |
| | | | | | AL031587, AC007216, AF001548, AL035361, AC007151, AL079340, |
| | | | | | U91327, AL078644, Z93930, AC005619, AC006511, AC004839, AL031311, |
| | | | | | AF134726, AL078581, AC005088, AC000353, AC005412, AC006515, |
| | | | | | AC005924, AL022313, AC007981, AC006430, AC004554, AL021977, |
| | | | | | AB020863, Z84484, AL008635, AC006501, AC006116, AC005154, |
| | | | | | AC002350, AC005082, AL035659, Z97054, AJ246003, AC002314, |
| | | | | | AL031431, AP000311, AF227510, AL109628, AC006367, AC003957, |
| | | | | | AC006537, AP001068, AC004223, AL035400, AL035494, AC006960, |
| | | | | | AC006130, AL049636, AP000120, AP000167, AP000052, AL133371, |
| | | | | | AC004019, AC005288, AC003689, AC004099, AC002553, AL031683, |
| | | | | | AC005856, AL049776, Z99943, AF042090, Z98051, AL049712, AP000114, |
| | | | | | AL049557, AC004900, AL022316, AC009516, AC005932, AL031577, |
| | | | | | U62293, AC008124, AF141325, AC005256, AL133448, AC006040, |
| | | | | | AL080243, AL096776, AL078472, AC007193, AF060568, AC006071, |
| | | | | | AC005696, AF001552, AC003982, and AC002565. |
| HEFMC68 | 155 | 752699 | 1-519 | 15-533 | R62375, R23828, AI092633, H12722, AA491822, AI086054, AI167223, |
| | | | | | AW194470, and AA987998. |
| HATE183 | 156 | 781290 | 1-401 | 15-415 | H91373, and H90564. |
| HATEG67 | 157 | 864454 | 1-474 | 15-488 | AA774693, and AA043544. |
| HATEE95 | 158 | 908958 | 1-563 | 15-577 | AA086156, H81241, H67045, AI819448, AI377675, U28282, and AL050309. |
| HATEC80 | 159 | 461733 | 1-519 | 15-533 | T74053, F12369, AA027215, and AW194601. |
| HATEC07 | 160 | 960782 | 1-590 | 15-604 | AA723025, AA708478, N29931, AA504192, AI761852, AW273477, |
| | | | | | AA443956, AA974499, AA716696, AW269824, AA434443, AI707848, |
| | | | | | AI476814, AA993753, N27730, AI050821, AI248475, AW071025, |
| | | | | | AA411210, AA814543, AA417996, AW071570, AW025350, W74344, |
| | | | | | AW188958, AW167655, N26927, AA748561, AA705781, AW294610, |
| | | | | | AI591113, AI623473, AA586906, AA574049, AA833607, AA418055, |
| | | | | | AW027617, AA633212, AI452555, AW338423, AI284330, W95062, R59175, |
| | | | | | T65000, AA993212, N58311, H91466, AA405832, N80150, AA805411, |
| | | | | | H69589, AA632135, AW193961, N27744, H48787, AW080735, T53881, |
| | | | | | H86073, AA327279, R72184, AA719996, AI951713, AW439101, H68481, |
| | | | | | AW439110, AI041429, AA932990, AA290758, AI301278, R00838, |
| | | | | | AA342345, R69430, AI915200, AI470398, AA888272, AI784177, AI801093, |
| | | | | | AA935078, AA935062, T99499, AA412129, F37718, AW450038, AI470409, |
| | | | | | AA700546, AI798643, AA384582, AI302593, AA342344, AI682312, |
| | | | | | AI557037, AA928847, T72850, AA290757, R70407, AI298655, AA879063, |
| | | | | | and AA419235. |
| HATDY17 | 161 | 664314 | 1-904 | 15-918 | H08953, R88593, and AW205464. |
| HATDY02 | 162 | 920529 | 1-425 | 15-439 | AA251582, and AL035400. |
| HATDX74 | 163 | 765761 | 1-541 | 15-555 | H77749, AF025422, AC006430, AL049543, and AL049646. |
| HATDX03 | 164 | 848537 | 1-358 | 15-372 | AI629046, AA579989, AW196403, and AI989819. |
| HATDU21 | 165 | 671175 | 1-429 | 15-443 | H62097. |
| HATDQ08 | 166 | 959815 | 1-451 | 15-465 | AI469368, AA737019, T86318, AI023438, AC000115, Z97632, AC002369, |
| | | | | | AL022576, AL049834, AL031278, AL133249, AL121652, Z81009, Z69722, |
| | | | | | AL022322, and AC010200. |
| HATDO55 | 167 | 732301 | 1-666 | 15-680 | N78327, N92203, AJ239465, and AW338091. |
| HATDM11 | 168 | 967365 | 1-380 | 15-394 | AA961663. |
| HATDJ67 | 169 | 575729 | 1-429 | 15-443 | T10256. |
| HATDJ51 | 170 | 725807 | 1-403 | 15-417 | R35793, AI469882, R34139, AI742584, AI123831, AI819323, AA149528, |
| | | | | | AW340912, AI274691, AI686703, AA487152, AA486832, F28756, |
| | | | | | AA604751, AC004382, AC005335, AP000555, AC007546, AP000153, |
| | | | | | AP000012, AL096678, U91318, AJ238093, AC006450, AL035398, |
| | | | | | AP000144, Z93341, AC005061, AL109967, AC004099, AF064865, |
| | | | | | AC004955, Y14768, AP000505, and AC003004. |
| HATDG45 | 171 | 722088 | 1-491 | 15-505 | R82721, H03878, AI049833, AA776543, R81946, AW377430, AI557397, |
| | | | | | AA768409, R31636, AI359285, AA837339, AL119442, W93544, AA868412, |
| | | | | | AI204076, H03879, AW390385, N67400, and AL049742. |
| HATDE07 | 172 | 952994 | 1-464 | 15-478 | |
| HATCV79 | 173 | 573563 | 1-417 | 15-431 | T84239, R02033, and N78808. |
| HATCV67 | 174 | 573565 | 1-431 | 15-445 | AA825988, AI358384, AA665330, AA424249, AA857296, AA661948, |
| | | | | | AI524453, AW029095, AA639025, AA226584, AW062724, AA526339, |
| | | | | | AL048616, AC005841, AC005081, AL096791, AC006013, AC005280, |
| | | | | | AC009247, AL022316, U67817, Z93017, AL139054, AC005821, AL031597, |
| | | | | | AL024498, AC005921, Z82208, AC004859, AC006211, AC007011, U78027, |
| | | | | | AL035422, AC005520, AC005736, AC005082, AC005102, AC005037, |
| | | | | | Z68273, AC004895, AL008718, AC002984, AC008040, AP000117, |
| | | | | | AC002301, AC005740, AF111168, AC003101, AC005940, AC002347, |
| | | | | | Z77249, AC005919, AC007842, AD000671, AC003957, AL078477, |
| | | | | | AP000193, AL049776, AC004996, AL031311, AL021707, AL096701, |
| | | | | | AC006088, AC007151, AC005531, AL035681, X60459, AC004687, |
| | | | | | AL031777, AC005004, AC005696, AL031589, AP000501, AL049829, |
| | | | | | AC002369, AL035684, AP000504, AC006146, AF053356, AC003043, |
| | | | | | AC007537, AC005207, AP000053, Z83844, AC005399, AL031680, |
| | | | | | AF001549, AL049793, AP000112, AF109907, AC000353, AC006137, |
| | | | | | AC005288, AC005837, AL031672, AC004991, AL109963, AC003035, |
| | | | | | AP000248, AC004167, AL049795, AL049766, AC005257, AC004967, |
| | | | | | U85195, AL049694, AC005015, AC003950, AP000065, AC002470, |
| | | | | | AL022476, AC002091, AC007919, AC007773, AC002314, AE000658, |
| | | | | | AL022336, AC007201, AC004890, AL109623, AC007546, AC007103, |
| | | | | | AL021937, AL133448, AC004975, AL049839, U96629, AC006210, |
| | | | | | AC004019, AP000044, AC005701, AC005783, AL031005, AJ011930, |
| | | | | | AC005330, U80017, Z97054, Z83840, AC002558, AL022329, AF196779, |
| | | | | | AC003002, AL022165, L44140, AL035587, AP000297, AC006064, |
| | | | | | AC005332, AC007051, Z73359, Z98051, AC007387, AC005256, AL132712, |
| | | | | | AP000556, AC007066, AC000039, Z97353, AC003006, AL035415, U91326, |
| | | | | | AC008372, AF129756, Z85987, AC005725, AL031282, AL035659, |
| | | | | | AC005231, AC002350, AC006011, AL031848, AC003688, AC007406, |
| | | | | | AP000132, AP000210, Z99716, AL031289, AC005516, AC002302, |
| | | | | | AC005324, AP000555, AC004408, AL121825, AP000550, AC006316, |
| | | | | | AC004583, AL049569, AF047825, AC005829, AP000252, AC004491, |
| | | | | | AC004531, and AC004662. |
| HATCV56 | 175 | 573558 | 1-316 | 15-330 | |
| HATCV20 | 176 | 739258 | 1-466 | 15-480 | AA598959, AI077314, AI061287, AI336299, AI075877, AI033241, W88498, |
| | | | | | and AI189584. |
| HATCS68 | 177 | 573572 | 1-195 | 15-209 | |
| HATCS57 | 178 | 573530 | 1-209 | 15-223 | AI912266, and AW149530. |
| HATCR61 | 179 | 576886 | 1-523 | 15-537 | AW090089, H92150, R68903, AI738532, AA757237, and T17176. |
| HATCR10 | 180 | 848579 | 1-448 | 15-462 | AI935577, N46381, and AA451917. |
| HATCQ89 | 181 | 786007 | 1-502 | 15-516 | H05023, H08140, R59592, H17462, Z38924, and R42030. |
| HATCP45 | 182 | 722080 | 1-441 | 15-455 | N48694, AA021459, and H08850. |
| HATCO92 | 183 | 790644 | 1-422 | 15-436 | T75204, R56167, and AI074525. |
| HATCM33 | 184 | 953785 | 1-847 | 15-861 | AA203742, AA806832, AI693143, AA847662, AI221206, AI243247, |
| | | | | | AI268751, H62501, AA761650, and AW026782. |
| HATCK18 | 185 | 828685 | 1-327 | 15-341 | AI962898, AL134096, AA434339, AA128731, AW366216, AW366200, |
| | | | | | AW366207, AB020703, AF006010, and X64411. |
| HATC179 | 186 | 781788 | 1-499 | 15-513 | R70095, and AC007938. |
| HATCG82 | 187 | 529945 | 1-291 | 15-305 | N79234. |
| HATCA28 | 188 | 848588 | 1-457 | 15-471 | AA814656. |
| HATBS55 | 189 | 864521 | 1-397 | 15-411 | AI859267, and N73876. |
| HATBS24 | 190 | 678242 | 1-179 | 15-193 | T89749, and AL034430. |
| HATBO95 | 191 | 796708 | 1-433 | 15-447 | H67423, R96585, and AA319677. |
| HATBM50 | 192 | 724746 | 1-291 | 15-305 | R99037, N88277, R15468, and AC007637. |
| HATBK63 | 193 | 864526 | 1-613 | 15-627 | AI369336, and AA319792. |
| HATBK55 | 194 | 929962 | 1-698 | 15-712 | AI989562, AI819495, AW295225, AL079441, AI436733, AI804133, |
| | | | | | AI332921, N23300, T65385, AI656292, AA759025, AA609593, AA150968, |
| | | | | | AI949307, AA788611, AW130408, AL079440, T85109, AI032091, N50534, |
| | | | | | AA701462, AA495962, AA701439, H81661, AI358355, AA644490, R40408, |
| | | | | | H23203, AI252619, AI273447, H04326, AA705682, AA828433, AI303016, |
| | | | | | AI620602, F09468, AI566074, AA425027, W22700, N63859, AA319820, |
| | | | | | N55310, and AA773787. |
| HATBG59 | 195 | 504646 | 1-606 | 15-620 | H86164, and AA059295. |
| HATBD89 | 196 | 785931 | 1-521 | 15-535 | AI769476, AI339358, AW269989, AI215593, AA973129, AW450132, |
| | | | | | N95340, N95339, W77827, W72191, W24962, AA449445, AI924951, |
| | | | | | F07156, T97368, R17830, R60812, R94023, and AA411841. |
| HATBB46 | 197 | 504599 | 1-375 | 15-389 | AW341225, T56431, AA319504, T56582, and AF147345. |
| HATAN13 | 198 | 667768 | 1-476 | 15-490 | R34024, AA319108, and AC004139. |
| HATAF70 | 199 | 888959 | 1-310 | 15-324 | AA318913. |
| HATAE60 | 200 | 928455 | 1-739 | 15-753 | H15621. |
| HATAC82 | 201 | 958793 | 1-275 | 15-289 | AA318740, AI878998, AI815979, AA044813, AI245242, AA025347, |
| | | | | | AI693593, AW008397, AA283774, AI572009, AI199482, H71578, |
| | | | | | AA551870, AA935928, AI66003, AA934930, AI885030, AA513683, |
| | | | | | N48184, AI141037, W32234, AI309256, AI202821, AI220856, AA593956, |
| | | | | | AI816062, AA312590, AI640612, AW054852, AA923113, AI197973, |
| | | | | | AA293644, H84051, H01948, H89912, N89813, R34586, AI879497, |
| | | | | | AI586956, AA642443, T98429, AA502925, AA406368, AW007352, |
| | | | | | W39069, AA252664, AF041429, and AL022069. |
| HATAA80 | 202 | 781648 | 1-348 | 15-362 | T78902, T70579, T91229, and AA318780. |

[0104] TABLE 4

| | | | | Cell | | |
|---|---|---|---|---|---|---|
| Code | Description | Tissue | Organ | Line | Disease | Vector |
| AR022 | a Heart | a Heart | | | | |
| AR023 | a Liver | a Liver | | | | |
| AR024 | a mammary gland | a mammary gland | | | | |
| AR025 | a Prostate | a Prostate | | | | |
| AR026 | a small intestine | a small intestine | | | | |
| AR027 | a Stomach | a Stomach | | | | |
| AR028 | Blood B cells | Blood B cells | | | | |
| AR029 | Blood B cells activated | Blood B cells | | | | |
| | | activated | | | | |
| AR030 | Blood B cells resting | Blood B cells | | | | |
| | | resting | | | | |
| AR031 | Blood T cells activated | Blood T cells | | | | |
| | | activated | | | | |
| AR032 | Blood T cells resting | Blood T cells | | | | |
| | | resting | | | | |
| AR033 | brain | brain | | | | |
| AR034 | breast | breast | | | | |
| AR035 | breast cancer | breast cancer | | | | |
| AR036 | Cell Line CAOV3 | Cell Line CAOV3 | | | | |
| AR037 | cell line PA-1 | cell line PA-1 | | | | |
| AR038 | cell line transformed | cell line | | | | |
| | | transformed | | | | |
| AR039 | colon | colon | | | | |
| AR040 | colon (9808co65R) | colon | | | | |
| | | (9808co65R) | | | | |
| AR041 | colon (9809co15) | colon (9809co15) | | | | |
| AR042 | colon cancer | colon cancer | | | | |
| AR043 | colon cancer | colon cancer | | | | |
| | (9808co64R) | (9808co64R) | | | | |
| AR044 | colon cancer 9809co14 | colon cancer | | | | |
| | | 9809co14 | | | | |
| AR045 | corn clone 5 | corn clone 5 | | | | |
| AR046 | corn clone 6 | corn clone 6 | | | | |
| AR047 | corn clone 2 | corn clone 2 | | | | |
| AR048 | corn clone 3 | corn clone 3 | | | | |
| AR049 | Corn Clone 4 | Corn Clone 4 | | | | |
| AR050 | Donor II B Cells 24 hrs | Donor II B Cells | | | | |
| | | 24 hrs | | | | |
| AR051 | Donor II B Cells 72 hrs | Donor II B Cells | | | | |
| | | 72 hrs | | | | |
| AR052 | Donor II B-Cells 24 hrs. | Donor II B-Cells | | | | |
| | | 24 hrs. | | | | |
| AR053 | Donor II B-Cells 72 hrs | Donor II B-Cells | | | | |
| | | 72 hrs | | | | |
| AR054 | Donor II Resting B Cells | Donor II Resting | | | | |
| | | B Cells | | | | |
| AR055 | Heart | Heart | | | | |
| AR056 | Human Lung | Human Lung | | | | |
| | (clonetech) | (clonetech) | | | | |
| AR057 | Human Mammary | Human Mammary | | | | |
| | (clontech) | (clontech) | | | | |
| AR058 | Human Thymus | Human Thymus | | | | |
| | (clonetech) | (clonetech) | | | | |
| AR059 | Jurkat (unstimulated) | Jurkat | | | | |
| | | (unstimulated) | | | | |
| AR060 | Kidney | Kidney | | | | |
| AR061 | Liver | Liver | | | | |
| AR062 | Liver (Clontech) | Liver (Clontech) | | | | |
| AR063 | Lymphocytes chronic | Lymphocytes | | | | |
| | lymphocytic leukaemia | chronic | | | | |
| | | lymphocytic | | | | |
| | | leukaemia | | | | |
| AR064 | Lymphocytes diffuse | Lymphocytes | | | | |
| | large B cell lymphoma | diffuse large B | | | | |
| | | cell lymphoma | | | | |
| AR065 | Lymphocytes follicular | Lymphocytes | | | | |
| | lymphoma | follicular | | | | |
| | | lymphoma | | | | |
| AR066 | normal breast | normal breast | | | | |
| AR067 | Normal Ovarian | Normal Ovarian | | | | |
| | (4004901) | (4004901) | | | | |
| AR068 | Normal Ovary | Normal Ovary | | | | |
| | 9508G045 | 9508G045 | | | | |
| AR069 | Normal Ovary | Normal Ovary | | | | |
| | 9701G208 | 9701G208 | | | | |
| AR070 | Normal Ovary | Normal Ovary | | | | |
| | 9806G005 | 9806G005 | | | | |
| AR071 | Ovarian Cancer | Ovarian Cancer | | | | |
| AR072 | Ovarian Cancer | Ovarian Cancer | | | | |
| | (9702G001) | (9702G001) | | | | |
| AR073 | Ovarian Cancer | Ovarian Cancer | | | | |
| | (9707G029) | (9707G029) | | | | |
| AR074 | Ovarian Cancer | Ovarian Cancer | | | | |
| | (9804G011) | (9804G011) | | | | |
| AR075 | Ovarian Cancer | Ovarian Cancer | | | | |
| | (9806G019) | (9806G019) | | | | |
| AR076 | Ovarian Cancer | Ovarian Cancer | | | | |
| | (9807G017) | (9807G017) | | | | |
| AR077 | Ovarian Cancer | Ovarian Cancer | | | | |
| | (9809G001) | (9809G001) | | | | |
| AR078 | ovarian cancer 15799 | ovarian cancer | | | | |
| | | 15799 | | | | |
| AR079 | Ovarian Cancer | Ovarian Cancer | | | | |
| | 17717AID | 17717AID | | | | |
| AR080 | Ovarian Cancer | Ovarian Cancer | | | | |
| | 4004664B1 | 4004664B1 | | | | |
| AR081 | Ovarian Cancer | Ovarian Cancer | | | | |
| | 4005315A1 | 4005315A1 | | | | |
| AR082 | ovarian cancer | ovarian cancer | | | | |
| | 94127303 | 94127303 | | | | |
| AR083 | Ovarian Cancer | Ovarian Cancer | | | | |
| | 96069304 | 96069304 | | | | |
| AR084 | Ovarian Cancer | Ovarian Cancer | | | | |
| | 9707G029 | 9707G029 | | | | |
| AR085 | Ovarian Cancer | Ovarian Cancer | | | | |
| | 9807G045 | 9807G045 | | | | |
| AR086 | ovarian cancer | ovarian cancer | | | | |
| | 9809G001 | 9809G001 | | | | |
| AR087 | Ovarian Cancer | Ovarian Cancer | | | | |
| | 9905C032RC | 9905C032RC | | | | |
| AR088 | Ovarian cancer 9907 | Ovarian cancer | | | | |
| | C00 3rd | 9907 C00 3rd | | | | |
| AR089 | Prostate | Prostate | | | | |
| AR090 | Prostate (clonetech) | Prostate | | | | |
| | | (clonetech) | | | | |
| AR091 | prostate cancer | prostate cancer | | | | |
| AR092 | prostate cancer #15176 | prostate cancer | | | | |
| | | #15176 | | | | |
| AR093 | prostate cancer #15509 | prostate cancer | | | | |
| | | #15509 | | | | |
| AR094 | prostate cancer #15673 | prostate cancer | | | | |
| | | #15673 | | | | |
| AR095 | Small Intestine | Small Intestine | | | | |
| | (Clontech) | (Clontech) | | | | |
| AR096 | Spleen | Spleen | | | | |
| AR097 | Thymus T cells | Thymus T cells | | | | |
| | activated | activated | | | | |
| AR098 | Thymus T cells resting | Thymus T cells | | | | |
| | | resting | | | | |
| AR099 | Tonsil | Tonsil | | | | |
| AR100 | Tonsil geminal center | Tonsil geminal | | | | |
| | centroblast | center centroblast | | | | |
| AR101 | Tonsil germinal center B | Tonsil germinal | | | | |
| | cell | center B cell | | | | |
| AR102 | Tonsil lymph node | Tonsil lymph node | | | | |
| AR103 | Tonsil memory B cell | Tonsil memory B | | | | |
| | | cell | | | | |
| AR104 | Whole Brain | Whole Brain | | | | |
| AR105 | Xenograft ES-2 | Xenograft ES-2 | | | | |
| AR106 | Xenograft SW626 | Xenograft SW626 | | | | |
| H0013 | Human 8 Week Whole | Human 8 Week | Embryo | | | Uni-ZAP |
| | Embryo | Old Embryo | | | | XR |
| H0021 | Human Infant Adrenal | Human Infant | Adrenal | | | Uni-ZAP |
| | Gland | Adrenal Gland | gland | | | XR |
| H0033 | Human Pituitary | Human Pituitary | | | | Uni-ZAP |
| | | | | | | XR |
| H0034 | Human Parathyroid | Human | Parathyroid | | disease | Uni-ZAP |
| | Tumor | Parathyroid | | | | XR |
| | | Tumor | | | | |
| H0040 | Human Testes Tumor | Human Testes | Testis | | disease | Uni-ZAP |
| | | Tumor | | | | XR |
| H0050 | Human Fetal Heart | Human Fetal | Heart | | | Uni-ZAP |
| | | Heart | | | | XR |
| H0052 | Human Cerebellum | Human | Brain | | | Uni-ZAP |
| | | Cerebellum | | | | XR |
| H0071 | Human Infant Adrenal | Human Infant | Adrenal | | | Uni-ZAP |
| | Gland | Adrenal Gland | gland | | | XR |
| H0087 | Human Thymus | Human Thymus | | | | pBluescript |
| H0090 | Human T-Cell | T-Cell Lymphoma | T-Cell | | disease | Uni-ZAP |
| | Lymphoma | | | | | XR |
| H0100 | Human Whole Six | Human Whole Six | Embryo | | | Uni-ZAP |
| | Week Old Embryo | Week Old Embryo | | | | XR |
| H0107 | Human Infant Adrenal | Human Infant | Adrenal | | | pBluescript |
| | Gland, subtracted | Adrenal Gland | gland | | | |
| H0135 | Human Synovial | Human Synovial | Synovium | | | Uni-ZAP |
| | Sarcoma | Sarcoma | | | | XR |
| H0156 | Human Adrenal Gland | Human Adrenal | Adrenal | | disease | Uni-ZAP |
| | Tumor | Gland Tumor | Gland | | | XR |
| H0178 | Human Fetal Brain | Human Fetal | Brain | | | Uni-ZAP |
| | | Brain | | | | XR |
| H0213 | Human Pituitary, | Human Pituitary | | | | Uni-ZAP |
| | subtracted | | | | | XR |
| H0255 | breast lymph node | Breast Lymph | Lymph | | | Lambda |
| | CDNA library | Node | Node | | | ZAP II |
| H0275 | Human Infant Adrenal | Human Infant | Adrenal | | | pBluescript |
| | Gland, Subtracted | Adrenal Gland | gland | | | |
| H0318 | HUMAN B CELL | Human B Cell | Lymph | | disease | Uni-ZAP |
| | LYMPHOMA | Lymphoma | Node | | | XR |
| H0375 | Human Lung | Human Lung | | | | pCMVSport1 |
| H0401 | Human Pituitary, | Human Pituitary | | | | pBluescript |
| | subtracted V | | | | | |
| H0405 | Human Pituitary, | Human Pituitary | | | | pBluescript |
| | subtracted VI | | | | | |
| H0416 | Human Neutrophils, | Human Neutrophil - | Blood | Cell | | pBluescript |
| | Activated, re-excision | Activated | | Line | | |
| H0417 | Human Pituitary, | Human Pituitary | | | | pBluescript |
| | subtracted VIII | | | | | |
| H0418 | Human Pituitary, | Human Pituitary | | | | pBluescript |
| | subtracted VII | | | | | |
| H0424 | Human Pituitary, subt | Human Pituitary | | | | pBluescript |
| | IX | | | | | |
| H0506 | Ulcerative Colitis | Colon | Colon | | | pSport1 |
| H0518 | pBMC stimulated w/ | pBMC stimulated | | | | pCMVSport |
| | poly I/C | with poly I/C | | | | 3.0 |
| H0521 | Primary Dendritic Cells, | Primary Dendritic | | | | pCMVSport |
| | lib 1 | cells | | | | 3.0 |
| H0522 | Primary Dendritic | Primary Dendritic | | | | pCMVSport |
| | cells,frac 2 | cells | | | | 3.0 |
| H0538 | Merkel Cells | Merkel cells | Lymph node | | | pSport1 |
| H0542 | T Cell helper I | Helper T cell | | | | pCMVSport |
| | | | | | | 3.0 |
| H0543 | T cell helper II | Helper T cell | | | | pCMVSport |
| | | | | | | 3.0 |
| H0547 | NTERA2 | NTERA2, | | | | pSport1 |
| | teratocarcinoma cell | Teratocarcinoma | | | | |
| | line+retinoic acid (14 | cell line | | | | |
| | days) | | | | | |
| H0553 | Human Placenta | Human Placenta | | | | pCMVSport |
| | | | | | | 3.0 |
| H0555 | Rejected Kidney, lib 4 | Human Rejected | Kidney | | disease | pCMVSport |
| | | Kidney | | | | 3.0 |
| H0581 | Human Bone Marrow, | Human Bone | Bone | | | pCMVSport |
| | treated | Marrow | Marrow | | | 3.0 |
| H0591 | Human T-cell | T-Cell Lymphoma | T-Cell | | disease | Uni-ZAP |
| | lymphoma; re-excision | | | | | XR |
| H0595 | Stomach cancer | Stomach Cancer - | | | disease | Uni-ZAP |
| | (human); re-excision | 5383A (human) | | | | XR |
| H0597 | Human Colon; re- | Human Colon | | | | Lambda |
| | excision | | | | | ZAP II |
| H0599 | Human Adult Heart; re- | Human Adult | Heart | | | Uni-ZAP |
| | excision | Heart | | | | XR |
| H0604 | Human Pituitary, re- | Human Pituitary | | | | pBluescript |
| | excision | | | | | |
| H0638 | CD40 activated | CD40 activated | | | | pSport1 |
| | monocyte dendridic | monocyte | | | | |
| | cells | dendridic cells | | | | |
| H0650 | B-Cells | B-Cells | | | | pCMVSport |
| | | | | | | 3.0 |
| H0653 | Stromal Cells | Stromal Cells | | | | pSport1 |
| H0672 | Ovary, Cancer: | Ovarian | Ovary | | | pSport1 |
| | (4004576 A8) | Cancer(4004576A | | | | |
| | | 8) | | | | |
| H0673 | Human Prostate Cancer, | Human Prostate | Prostate | | | Uni-ZAP |
| | Stage B2; re-excision | Cancer, stage B2 | | | | XR |
| H0689 | Ovarian Cancer | Ovarian Cancer, | | | | pCMVSport |
| | | #9806G019 | | | | 3.0 |
| S0001 | Brain frontal cortex | Brain frontal | Brain | | | Lambda |
| | | cortex | | | | ZAP II |
| S0031 | Spinal cord | Spinal cord | spinal cord | | | Uni-ZAP |
| | | | | | | XR |
| S0053 | Neutrophils IL-1 and | human neutrophil | blood | Cell | | Uni-ZAP |
| | LPS induced | induced | | Line | | XR |
| S0116 | Bone marrow | Bone marrow | Bone | | | Uni-ZAP |
| | | | marrow | | | XR |
| S0142 | Macrophage-oxLDL | macrophage- | blood | Cell | | Uni-ZAP |
| | | oxidized LDL | | Line | | XR |
| | | treated | | | | |
| S0146 | prostate-edited | prostate BPH | Prostate | | | Uni-ZAP |
| | | | | | | XR |
| S0222 | H. Frontal | H. Brain, Frontal | Brain | | disease | Uni-ZAP |
| | cortex, epileptic; re- | Cortex, Epileptic | | | | XR |
| | excision | | | | | |
| S0280 | Human Adipose Tissue, | Human Adipose | | | | Uni-ZAP |
| | re-excision | Tissue | | | | XR |
| S0360 | Colon Tumor II | Colon Tumor | Colon | | disease | pSport1 |
| S0378 | Pancreas normal PCA4 | Pancreas Normal | | | | pSport1 |
| | No | PCA4 No | | | | |
| S0392 | Salivary Gland | Salivary gland; | | | | pSport1 |
| | | normal | | | | |
| S0402 | Adrenal Gland, normal | Adrenal gland; | | | | pSport1 |
| | | normal | | | | |
| S0426 | Monocyte activated; re- | Monocyte- | blood | Cell | | Uni-ZAP |
| | excision | activated | | Line | | XR |
| S0458 | Thyroid Normal | Thyroid normal | | | | pSport1 |
| | (SDCA2 No) | | | | | |
| S0462 | Thyroid Thyroiditis | Thyroid | | | | pSport1 |
| | | Thyroiditis | | | | |
| T0004 | Human White Fat | Human White Fat | | | | pBluescript |
| | | | | | | SK- |
| T0023 | Human Pancreatic | Human Pancreatic | | | disease | pBluescript |
| | Carcinoma | Carcinoma | | | | SK- |
| T0067 | Human Thyroid | Human Thyroid | | | | pBluescript |
| | | | | | | SK- |
| L0352 | Normalized infant brain, | | | | | BA, M13- |
| | Bento Soares | | | | | derived |
| L0375 | NCI_CGAP_Kid6 | kidney tumor | kidney | | | Bluescript |
| | | | | | | SK- |
| L0438 | normalized infant brain | total brain | brain | | | lafmid BA |
| | cDNA | | | | | |
| L0439 | Soares infant brain | | whole brain | | | Lafmid BA |
| | 1NIB | | | | | |
| L0471 | Human fetal heart, | | | | | Lambda |
| | Lambda ZAP Express | | | | | ZAP |
| | | | | | | Express |
| L0517 | NCI_CGAP_Pr1 | | | | | pAMP10 |
| L0518 | NCI_CGAP_Pr2 | | | | | pAMP10 |
| L0523 | NCI_CGAP_Lip2 | liposarcoma | | | | pAMP10 |
| L0530 | NCI_CGAP_Pr8 | prostate | | | | pAMP10 |
| L0532 | NCI_CGAP_Thy1 | thyroid | | | | pAMP10 |
| L0542 | NCI_CGAP_Pr11 | normal prostatic | prostate | | | pAMP10 |
| | | epithelial cells | | | | |
| L0589 | Stratagene fetal retina | | | | | pBluescript |
| | 937202 | | | | | SK- |
| L0591 | Stratagene HeLa cell s3 | | | | | pBluescript |
| | 937216 | | | | | SK- |
| L0592 | Stratagene hNT neuron | | | | | pBluescript |
| | (#937233) | | | | | SK- |
| L0594 | Stratagene | | | | | pBluescript |
| | neuroepithelium | | | | | SK- |
| | NT2RAMI 937234 | | | | | |
| L0596 | Stratagene colon | | colon | | | pBluescript |
| | (#937204) | | | | | SK- |
| L0599 | Stratagene lung | | lung | | | pBluescript |
| | (#937210) | | | | | SK- |
| L0600 | Weizmann Olfactory | olfactory | nose | | | pBluescript |
| | Epithelium | epithelium | | | | SK- |
| L0603 | Stratagene placenta | | placenta | | | pBluescript |
| | (#937225) | | | | | SK- |
| L0604 | Stratagene muscle | muscle | skeletal | | | pBluescript |
| | 937209 | | muscle | | | SK- |
| L0605 | Stratagene fetal spleen | fetal spleen | spleen | | | pBluescript |
| | #(937205) | | | | | SK- |
| L0609 | Schiller astrocytoma | astrocytoma | brain | | | pBluescript |
| | | | | | | SK- |
| | | | | | | (Stratagene) |
| L0633 | NCI_CGAP_Lu6 | small cell | lung | | | pCMV- |
| | | carcinoma | | | | SPORT4 |
| L0639 | NCI_CGAP_Brn52 | tumor, 5 pooled | brain | | | pCMV- |
| | | (see description) | | | | SPORT6 |
| L0655 | NCI_CGAP_Lym12 | lymphoma, | lymph node | | | pCMV- |
| | | follicular mixed | | | | SPORT6 |
| | | small and large | | | | |
| | | cell | | | | |
| L0658 | NCI_CGAP_Ov35 | tumor, 5 pooled | ovary | | | pCMV- |
| | | (see description) | | | | SPORT6 |
| L0659 | NCI_CGAP_Pan1 | adenocarcinoma | pancreas | | | pCMV- |
| | | | | | | SPORT6 |
| L0662 | NCI_CGAP_Gas4 | poorly | stomach | | | pCMV- |
| | | differentiated | | | | SPORT6 |
| | | adenocarcinoma | | | | |
| | | with signet r | | | | |
| L0664 | NCI_CGAP_Ut3 | poorly- | uterus | | | pCMV- |
| | | differentiated | | | | SPORT6 |
| | | endometrial | | | | |
| | | adenocarcinoma, | | | | |
| L0665 | NCI_CGAP_Ut4 | serous papillary | uterus | | | pCMV- |
| | | carcinoma, high | | | | SPORT6 |
| | | grade, 2 pooled t | | | | |
| L0666 | NCI_CGAP_Ut1 | well-differentiated | uterus | | | pCMV- |
| | | endometrial | | | | SPORT6 |
| | | adenocarcinoma, 7 | | | | |
| L0717 | Gessler Wilms tumor | | | | | pSPORT1 |
| L0731 | Soares_pregnant_uterus | | uterus | | | pT7T3-Pac |
| | NbHPU | | | | | |
| L0740 | Soares melanocyte | melanocyte | | | | pT7T3D |
| | 2NbHM | | | | | (Pharmacia) |
| | | | | | | with a |
| | | | | | | modified |
| | | | | | | polylinker |
| L0741 | Soares adult brain | | brain | | | pT7T3D |
| | N2b4HB55Y | | | | | (Pharmacia) |
| | | | | | | with a |
| | | | | | | modified |
| | | | | | | polylinker |
| L0743 | Soares breast 2NbHBst | | breast | | | pT7T3D |
| | | | | | | (Pharmacia) |
| | | | | | | with a- |
| | | | | | | modified |
| | | | | | | polylinker |
| L0745 | Soares retina N2b4HR | retina | eye | | | pT7T3D |
| | | | | | | (Pharmacia) |
| | | | | | | with a |
| | | | | | | modified |
| | | | | | | polylinker |
| L0746 | Soares retina N2b5HR | retina | eye | | | pT7T3D |
| | | | | | | (Pharmacia) |
| | | | | | | with a |
| | | | | | | modified |
| | | | | | | polylinker |
| L0747 | Soares_fetal_heart_{—} | | heart | | | pT7T3D |
| | NbHH19W | | | | | (Pharmacia) |
| | | | | | | with a |
| | | | | | | modified |
| | | | | | | polylinker |
| L0748 | Soares fetal liver spleen | | Liver and | | | pT7T3D |
| | INFLS | | Spleen | | | (Pharmacia) |
| | | | | | | with a |
| | | | | | | modified |
| | | | | | | polylinker |
| L0749 | Soares_fetal _liver_spleen_{—} | | Liver and | | | pT7T3D |
| | INFLS_S1 | | Spleen | | | (Pharmacia) |
| | | | | | | with a |
| | | | | | | modified |
| | | | | | | polylinker |
| L0750 | Soares_fetal_lung_{—} | | lung | | | pT7T3D |
| | NbHL19W | | | | | (Pharmacia) |
| | | | | | | with a |
| | | | | | | modified |
| | | | | | | polylinker |
| L0751 | Soares ovary tumor | ovarian tumor | ovary | | | pT7T3D |
| | NbHOT | | | | | (Pharmacia) |
| | | | | | | with a |
| | | | | | | modified |
| | | | | | | polylinker |
| L0752 | Soares_parathyroid_tumor_{—} | parathyroid tumor | parathyroid | | | pT7T3D |
| | NbHPA | | gland | | | (Pharmacia) |
| | | | | | | with a |
| | | | | | | modified |
| | | | | | | polylinker |
| L0753 | Soares_pineal_gland_{—} | | pineal gland | | | pT7T3D |
| | N3HPG | | | | | (Pharmacia) |
| | | | | | | with a |
| | | | | | | modified |
| | | | | | | polylinker |
| L0754 | Soares placenta Nb2HP | | placenta | | | pT7T3D |
| | | | | | | (Pharmacia) |
| | | | | | | with a |
| | | | | | | modified |
| | | | | | | polylinker |
| L0755 | Soares_placenta_8to9weeks_{—} | | placenta | | | pT7T3D |
| | 2NbHP8to9W | | | | | (Pharmacia) |
| | | | | | | with a |
| | | | | | | modified |
| | | | | | | polylinker |
| L0756 | Soares_multiple_sclerosis_{—} | multiple sclerosis | | | | pT7T3D |
| | 2NbHMSP | lesions | | | | (Pharmacia) |
| | | | | | | with a |
| | | | | | | modified |
| | | | | | | polylinker |
| | | | | | | V TYPE |
| L0757 | Soares_senescent_fibroblasts_{—} | senescent | | | | pT7T3D |
| | NbHSF | fibroblast | | | | (Pharmacia) |
| | | | | | | with a |
| | | | | | | modified |
| | | | | | | polylinker |
| | | | | | | V TYPE |
| L0758 | Soares_testis_NHT | | | | | pT7T3D-Pac |
| | | | | | | (Pharmacia) |
| | | | | | | with a |
| | | | | | | modified |
| | | | | | | polylinker |
| L0759 | Soares_total_fetus_{—} | | | | | pT7T3D-Pac |
| | Nb2HF8_9w | | | | | (Pharmacia) |
| | | | | | | with a |
| | | | | | | modified |
| | | | | | | polylinker |
| L0761 | NCI_CGAP_CLL1 | B-cell, chronic | | | | pT7T3D-Pac |
| | | lymphotic | | | | (Pharmacia) |
| | | leukemia | | | | with a |
| | | | | | | modified |
| | | | | | | polylinker |
| L0763 | NCI_CGAP_Br2 | breast | | | | pT7T3D-Pac |
| | | | | | | (Pharmacia) |
| | | | | | | with a |
| | | | | | | modified |
| | | | | | | polylinker |
| L0766 | NCI_CGAP_GCB1 | germinal center B | | | | pT7T3D-Pac |
| | | cell | | | | (Pharmacia) |
| | | | | | | with a |
| | | | | | | modified |
| | | | | | | polylinker |
| L0767 | NCI_CGAP_GC3 | pooled germ cell | | | | pT7T3D-Pac |
| | | tumors | | | | (Pharmacia) |
| | | | | | | with a |
| | | | | | | modified |
| | | | | | | polylinker |
| L0768 | NCI_CGAP_GC4 | pooled germ cell | | | | pT7T3D-Pac |
| | | tumors | | | | (Pharmacia) |
| | | | | | | with a |
| | | | | | | modified |
| | | | | | | polylinker |
| L0769 | NCI_CGAP_Brn25 | anaplastic | brain | | | pT7T3D-Pac |
| | | oligodendroglioma | | | | (Pharmacia) |
| | | | | | | with a |
| | | | | | | modified |
| | | | | | | polylinker |
| L0770 | NCI_CGAP_Brn23 | glioblastoma | brain | | | pT7T3D-Pac |
| | | (pooled) | | | | (Pharmacia) |
| | | | | | | with a |
| | | | | | | modified |
| | | | | | | polylinker |
| L0771 | NCI_CGAP_Co8 | adenocarcinoma | colon | | | pT7T3D-Pac |
| | | | | | | (Pharmacia) |
| | | | | | | with a |
| | | | | | | modified |
| | | | | | | polylinker |
| L0774 | NCI_CGAP_Kid3 | | kidney | | | pT7T3D-Pac |
| | | | | | | (Pharmacia) |
| | | | | | | with a |
| | | | | | | modified |
| | | | | | | polylinker |
| L0775 | NCI_CGAP_Kid5 | 2 pooled tumors | kidney | | | pT7T3D-Pac |
| | | (clear cell type) | | | | (Pharmacia) |
| | | | | | | with a |
| | | | | | | modified |
| | | | | | | polylinker |
| L0776 | NCI_CGAP_Lu5 | carcinoid | lung | | | pT7T3D-Pac |
| | | | | | | (Pharmacia) |
| | | | | | | with a |
| | | | | | | modified |
| | | | | | | polylinker |
| L0777 | Soares_NhHMPu_S1 | Pooled human | mixed (see | | | pT7T3D-Pac |
| | | melanocyte, fetal | below) | | | (Pharmacia) |
| | | heart, and | | | | with a |
| | | pregnant | | | | modified |
| | | | | | | polylinker |
| L0779 | Soares_NFL_T_GBC_S1 | | pooled | | | pT7T3D-Pac |
| | | | | | | (Pharmacia) |
| | | | | | | with a |
| | | | | | | modified |
| | | | | | | polylinker |
| L0787 | NCI_CGAP_Sub1 | | | | | pT7T3D-Pac |
| | | | | | | (Pharmacia) |
| | | | | | | with a |
| | | | | | | modified |
| | | | | | | polylinker |
| L0789 | NCI_CGAP_Sub3 | | | | | pT7T3D-Pac |
| | | | | | | (Pharmacia) |
| | | | | | | with a |
| | | | | | | modified |
| | | | | | | polylinker |
| L0790 | NCI_CGAP_Sub4 | | | | | pT7T3D-Pac |
| | | | | | | (Pharmacia) |
| | | | | | | with a |
| | | | | | | modified |
| | | | | | | polylinker |
| L0791 | NCI_CGAP_Sub5 | | | | | pT7T3D-Pac |
| | | | | | | (Pharmacia) |
| | | | | | | with a |
| | | | | | | modified |
| | | | | | | polylinker |
| L0794 | NCI_CGAP_GC6 | pooled germ cell | | | | pT7T3D-Pac |
| | | tumors | | | | (Pharmacia) |
| | | | | | | with a |
| | | | | | | modified |
| | | | | | | polylinker |
| L0803 | NCI_CGAP_Kid11 | | kidney | | | pT7T3D-Pac |
| | | | | | | (Pharmacia) |
| | | | | | | with a |
| | | | | | | modified |
| | | | | | | polylinker |
| L0805 | NCI_CGAP_Lu24 | carcinoid | lung | | | pT7T3D-Pac |
| | | | | | | (Pharmacia) |
| | | | | | | with a |
| | | | | | | modified |
| | | | | | | polylinker |
| L0809 | NCI_CGAP_Pr28 | | prostate | | | pT7T3D-Pac |
| | | | | | | (Pharmacia) |
| | | | | | | with a |
| | | | | | | modified |
| | | | | | | polylinker |

[0105] TABLE 5

| OMIM | |
|---|---|
| Reference | Description |
| 100650 | Fetal alcohol syndrome |
| 100650 | Alcohol intolerance, acute |
| 120435 | Muir-Torre syndrome, 158320 |
| 120435 | Colorectal cancer, hereditary, nonpolyposis, type 1 Ovarian |
| | cancer |
| 123829 | Melanoma |
| 124200 | Darier disease (keratosis follicularis) |
| 126600 | Doyne honeycomb retinal dystrophy |
| 126600 | Drusen, radial, autosomal dominant |
| 135300 | Fibromatosis, gingival |
| 136435 | Ovarian dysgenesis, hypergonadotropic, with normal |
| | karyotype, 233300 |
| 142410 | Non-insulin-dependent diabetes mellitus-2, 601407 |
| 142410 | Insulin-dependent diabetes mellitus |
| 142410 | MODY, type 3, 600496 |
| 147440 | Growth retardation with deafness and mental retardation |
| 147570 | Interferon, immune, deficiency |
| 152790 | Precocious puberty, male, 176410 |
| 152790 | Leydig cell hypoplasia |
| 157170 | Holoprosencephaly-2 |
| 160781 | Cardiomyopathy, hypertrophic, mid-left ventricular |
| | chamber type |
| 160980 | Carney myxoma-endocrine complex |
| 181405 | Scapuloperoneal spinal muscular atrophy, New England type |
| 181430 | Scapuloperoneal syndrome, myopathic type |
| 182601 | Spastic paraplegia-4 |
| 252940 | Sanfilippo syndrome, type D |
| 261600 | Phenylketonuria |
| 261600 | [Hyperphenylalaninemia, mild] |
| 264700 | Pseudo-vitamin D dependency rickets 1 |
| 300047 | Mental retardation, X-linked 20 |
| 301300 | Anemia, sideroblastic/hypochromic |
| 301830 | Arthrogryposis, X-linked (spinal muscular atrophy, |
| | infantile, X-linked) |
| 305400 | Aarskog-Scott syndrome |
| 308300 | Incontinentia pigmenti, sporadic type |
| 309470 | Mental retardation, X-linked, syndromic-3, with spastic |
| | diplegia |
| 309500 | Renpenning syndrome-1 |
| 309610 | Mental retardation, X-linked, syndromic-2, with |
| | dysmorphism and cerebral atrophy |
| 311050 | Optic atrophy, X-linked |
| 600194 | Ichthyosis bullosa of Siemens, 146800 |
| 600231 | Palmoplantar keratoderma, Bothnia type |
| 600678 | Cancer susceptibility |
| 600808 | Enuresis, nocturnal, 2 |
| 601284 | Hereditary hemorrhagic telangiectasia-2, 600376 |
| 601406 | B-cell non-Hodgkin lymphoma, high-grade |
| 601620 | Holt-Oram syndrome, 142900 |
| 601621 | Ulnar-mammary syndrome, 181450 |
| 601769 | Osteoporosis, involutional |
| 601769 | Rickets, vitamin D-resistant, 277440 |
| 601771 | Glaucoma 3A, primary infantile, 231300 |
| 602116 | Glioma |

[0106] Polynucleotide and Polypeptide Variants

[0107] The present invention is also directed to variants of the endocrine associated polynucleotide sequence disclosed in SEQ ID NO:X or the complementary strand thereto, nucleotide sequences encoding the polypeptide of SEQ ID NO:Y, the nucleotide sequence of SEQ ID NO:X encoding the polypeptide sequence as defined in column 6 of Table 1A, nucleotide sequences encoding the polypeptide as defined in column 6 of Table 1A, the nucleotide sequence as defined in columns 8 and 9 of Table 2, nucleotide sequences encoding the polypeptide encoded by the nucleotide sequence as defined in columns 8 and 9 of Table 2, the nucleotide sequence as defined in column 6 of Table 1B, nuceotide sequences encoding the polypeptide encoded by the nucleotide sequence as defined in column 6 of Table 1B, the cDNA sequence contained in Clone ID NO:Z, and/or nucleotide sequences encoding a polypeptide encoded by the cDNA sequence contained in Clone ID NO:Z.

[0108] The present invention also encompasses variants of the polypeptide sequence disclosed in SEQ ID NO:Y, a polypeptide sequence as defined in column 6 of Table 1A, a polypeptide sequence encoded by the polynucleotide sequence in SEQ ID NO:X, a polypeptide sequence encoded by the nucleotide sequence as defined in columns 8 and 9 of Table 2, a polypeptide sequence encoded by the nucleotide sequence as defined in column 6 of Table 1B, a polypeptide sequence encoded by the complement of the polynucleotide sequence in SEQ ID NO:X, and/or a polypeptide sequence encoded by the cDNA sequence contained in Clone ID NO:Z.

[0109] “Variant” refers to a polynucleotide or polypeptide differing from the polynucleotide or polypeptide of the present invention, but retaining essential properties thereof. Generally, variants are overall closely similar, and, in many regions, identical to the polynucleotide or polypeptide of the present invention.

[0110] Thus, one aspect of the invention provides an isolated nucleic acid molecule comprising, or alternatively consisting of, a polynucleotide having a nucleotide sequence selected from the group consisting of: (a) a nucleotide sequence described in SEQ ID NO:X or contained in the cDNA sequence of Clone ID NO:Z; (b) a nucleotide sequence in SEQ ID NO:X or the cDNA in Clone ID NO:Z which encodes a mature endocrine associated polypeptide; (c) a nucleotide sequence in SEQ ID NO:X or the cDNA sequence of Clone ID NO:Z, which encodes a biologically active fragment of an endocrine associated polypeptide; (d) a nucleotide sequence in SEQ ID NO:X or the cDNA sequence of Clone ID NO:Z, which encodes an antigenic fragment of an endocrine associated polypeptide; (e) a nucleotide sequence encoding an endocrine associated polypeptide having the complete amino acid sequence of SEQ ID NO:Y or the complete amino acid sequence encoded by the cDNA in Clone ID NO:Z; (f) a nucleotide sequence encoding a mature endocrine associated polypeptide of the amino acid sequence of SEQ ID NO:Y or the amino acid sequence encoded by the cDNA in Clone ID NO:Z; (g) a nucleotide sequence encoding a biologically active fragment of an endocrine associated polypeptide having the complete amino acid sequence of SEQ ID NO:Y or the complete amino acid sequence encoded by the cDNA in Clone ID NO:Z; (h) a nucleotide sequence encoding an antigenic fragment of an endocrine associated polypeptide having the complete amino acid sequence of SEQ ID NO:Y or the complete amino acid sequence encoded by the cDNA in Clone ID NO:Z; and (i) a nucleotide sequence complementary to any of the nucleotide sequences in (a), (b), (c), (d), (e), (f), (g), or (h), above.

[0111] The present invention is also directed to nucleic acid molecules which comprise, or alternatively consist of, a nucleotide sequence which is at least 80%, 85%, 90%, 95%, 96%, 97%, 98%, 99% or 100%, identical to, for example, any of the nucleotide sequences in (a), (b), (c), (d), (e), (f), (g), (h), or (i) above, the nucleotide coding sequence in SEQ ID NO:X or the complementary strand thereto, the nucleotide coding sequence of the cDNA contained in Clone ID NO:Z or the complementary strand thereto, a nucleotide sequence encoding the polypeptide of SEQ ID NO:Y, a nucleotide sequence encoding a polypeptide sequence encoded by the nucleotide sequence in SEQ ID NO:X, a polypeptide sequence encoded by the complement of the polynucleotide sequence in SEQ ID NO:X, a nucleotide sequence encoding the polypeptide encoded by the cDNA contained in Clone ID NO:Z, the nucleotide coding sequence in SEQ ID NO:X as defined in columns 8 and 9 of Table 2 or the complementary strand thereto, a nucleotide sequence encoding the polypeptide encoded by the nucleotide sequence in SEQ ID NO:X as defined in columns 8 and 9 of Table. 2 or the complementary strand thereto, the nucleotide coding sequence in SEQ ID NO:B as defined in column 6 of Table 1B or the complementary strand thereto, a nucleotide sequence encoding the polypeptide encoded by the nucleotide sequence in SEQ ID NO:B as defined in column 6 of Table 1B or the complementary strand thereto, the nucleotide sequence in SEQ ID NO:X encoding a polypeptide sequence as defined in column 6 of Table 1A or the complementary strand thereto, nucleotide sequences encoding the polypeptide as defined in column 6 of Table 1A or the complementary strand thereto, and/or polynucleotide fragments of any of these nucleic acid molecules (e.g., those fragments described herein). Polynucleotides which hybridize to the complement of these nucleic acid molecules under stringent hybridization conditions or alternatively, under lower stringency conditions, are also encompassed by the invention, as are polypeptides encoded by these polynucleotides and nucleic acids.

[0112] In a preferred embodiment, the invention encompasses nucleic acid molecules which comprise, or alternatively, consist of a polynucleotide which hybridizes under stringent hybridization conditions, or alternatively, under lower stringency conditions, to a polynucleotide in (a), (b), (c), (d), (e), (f), (g), (h), or (i) above, as are polypeptides encoded by these polynucleotides. In another preferred embodiment, polynucleotides which hybridize to the complement of these nucleic acid molecules under stringent hybridization conditions or alternatively, under lower stringency conditions, are also encompassed by the invention, as are polypeptides encoded by these polynucleotides.

[0113] In another embodiment, the invention provides a purified protein comprising, or alternatively consisting of, a polypeptide having an amino acid sequence selected from the group consisting of (a) the complete amino acid sequence of SEQ ID NO:Y or the complete amino acid sequence encoded by the cDNA in Clone ID NO:Z; (b) the amino acid sequence of a mature endocrine associated polypeptide having the amino acid sequence of SEQ ID NO:Y or the amino acid sequence encoded by the cDNA in Clone ID NO:Z; (c) the amino acid sequence of a biologically active fragment of an endocrine associated polypeptide having the complete amino acid sequence of SEQ ID NO:Y or the complete amino acid sequence encoded by the cDNA in Clone ID NO:Z; and (d) the amino acid sequence of an antigenic fragment of an endocrine associated polypeptide having the complete amino acid sequence of SEQ ID NO:Y or the complete amino acid sequence encoded by the cDNA in Clone ID NO:Z.

[0114] The present invention is also directed to proteins which comprise, or alternatively consist of, an amino acid sequence which is at least 80%, 85%, 90%, 95%, 96%, 97%, 98%, 99% or 100%, identical to, for example, any of the amino acid sequences in (a), (b), (c), or (d), above, the amino acid sequence shown in SEQ ID NO:Y, the amino acid sequence encoded by the cDNA contained in Clone ID NO:Z, the amino acid sequence of the polypeptide encoded by the nucleotide sequence in SEQ ID NO:X as defined in columns 8 and 9 of Table 2, the amino acid sequence of the polypeptide encoded by the nucleotide sequence in SEQ ID NO:B as defined in column 6 of Table 1B, the amino acid sequence as defined in column 6 of Table 1A, an amino acid sequence encoded by the nucleotide sequence in SEQ ID NO:X, and an amino acid sequence encoded by the complement of the polynucleotide sequence in SEQ ID NO:X. Fragments of these polypeptides are also provided (e.g., those fragments described herein). Further proteins encoded by polynucleotides which hybridize to the complement of the nucleic acid molecules encoding these amino acid sequences under stringent hybridization conditions or alternatively, under lower stringency conditions, are also encompassed by the invention, as are the polynucleotides encoding these proteins.

[0115] By a nucleic acid having a nucleotide sequence at least, for example, 95% “identical” to a reference nucleotide sequence of the present invention, it is intended that the nucleotide sequence of the nucleic acid is identical to the reference sequence except that the nucleotide sequence may include up to five point mutations per each 100 nucleotides of the reference nucleotide sequence encoding the polypeptide. In other words, to obtain a nucleic acid having a nucleotide sequence at least 95% identical to a reference nucleotide sequence, up to 5% of the nucleotides in the reference sequence may be deleted or substituted with another nucleotide, or a number of nucleotides up to 5% of the total nucleotides in the reference sequence may be inserted into the reference sequence. The query sequence may be an entire sequence referred to in Table 1A or 2 as the ORF (open reading frame), or any fragment specified, as described herein.

[0116] As a practical matter, whether any particular nucleic acid molecule or polypeptide is at least 80%, 85%, 90%, 95%, 96%, 97%, 98% or 99% identical to a nucleotide sequence of the present invention can be determined conventionally using known computer programs. A preferred method for determining the best overall match between a query sequence (a sequence of the present invention) and a subject sequence, also referred to as a global sequence alignment, can be determined using the FASTDB computer program based on the algorithm of Brutlag et al. (Comp. App. Biosci. 6:237-245 (1990)). In a sequence alignment the query and subject sequences are both DNA sequences. An RNA sequence can be compared by converting U's to T's. The result of said global sequence alignment is expressed as percent identity. Preferred parameters used in a FASTDB alignment of DNA sequences to calculate percent identity are: Matrix=Unitary, k-tuple=4, Mismatch Penalty=1, Joining Penalty=30, Randomization Group Length=0, Cutoff Score=1, Gap Penalty=5, Gap Size Penalty 0.05, Window Size=500 or the length of the subject nucleotide sequence, whichever is shorter.

[0117] If the subject sequence is shorter than the query sequence because of 5′ or 3′ deletions, not because of internal deletions, a manual correction must be made to the results. This is because the FASTDB program does not account for 5′ and 3′ truncations of the subject sequence when calculating percent identity. For subject sequences truncated at the 5′ or 3′ ends, relative to the query sequence, the percent identity is corrected by calculating the number of bases of the query sequence that are 5′ and 3′ of the subject sequence, which are not matched/aligned, as a percent of the total bases of the query sequence. Whether a nucleotide is matched/aligned is determined by results of the FASTDB sequence alignment. This percentage is then subtracted from the percent identity, calculated by the above FASTDB program using the specified parameters, to arrive at a final percent identity score. This corrected score is what is used for the purposes of the present invention. Only bases outside the 5′ and 3′ bases of the subject sequence, as displayed by the FASTDB alignment, which are not matched/aligned with the query sequence, are calculated for the purposes of manually adjusting the percent identity score.

[0118] For example, a 90 base subject sequence is aligned to a 100 base query sequence to determine percent identity. The deletions occur at the 5′ end of the subject sequence and therefore, the FASTDB alignment does not show a matched/alignment of the first 10 bases at 5′ end. The 10 unpaired bases represent 10% of the sequence (number of bases at the 5′ and 3′ ends not matched/total number of bases in the query sequence) so 10% is subtracted from the percent identity score calculated by the FASTDB program. If the remaining 90 bases were perfectly matched the final percent identity would be 90%. In another example, a 90 base subject sequence is compared with a 100 base query sequence. This time the deletions are internal deletions so that there are no bases on the 5′ or 3′ of the subject sequence which are not matched/aligned with the query. In this case the percent identity calculated by FASTDB is not manually corrected. Once again, only bases 5′ and 3′ of the subject sequence which are not matched/aligned with the query sequence are manually corrected for. No other manual corrections are to made for the purposes of the present invention.

[0119] By a polypeptide having an amino acid sequence at least, for example, 95% “identical” to a query amino acid sequence of the present invention, it is intended that the amino acid sequence of the subject polypeptide is identical to the query sequence except that the subject polypeptide sequence may include up to five amino acid alterations per each 100 amino acids of the query amino acid sequence. In other words, to obtain a polypeptide having an amino acid sequence at least 95% identical to a query amino acid sequence, up to 5% of the amino acid residues in the subject sequence may be inserted, deleted, (indels) or substituted with another amino acid. These alterations of the reference sequence may occur at the amino or carboxy terminal positions of the reference amino acid sequence or anywhere between those terminal positions, interspersed either individually among residues in the reference sequence or in one or more contiguous groups within the reference sequence.

[0120] As a practical matter, whether any particular polypeptide is at least 80%, 85%, 90%, 95%, 96%, 97%, 98% or 99% identical to, for instance, the amino acid sequence of a polypeptide referred to in Table 1A (e.g., an amino acid sequence identified in columns 5 or 6) or Table 2 (e.g., the amino acid sequence of the polypeptide encoded by the polynucleotide sequence defined in columns 8 and 9 of Table 2) or a fragment thereof, the amino acid sequence of the polypeptide encoded by the polynucleotide sequence in SEQ ID NO:B as defined in column 6 of Table 1B or a fragment thereof, the amino acid sequence of the polypeptide encoded by the nucleotide sequence in SEQ ID NO:X or a fragment thereof, or an amino acid sequence of the polypeptide encoded by cDNA contained in Clone ID NO:Z, or a fragment thereof, can be determined conventionally using known computer programs. A preferred method for determining the best overall match between a query sequence (a sequence of the present invention) and a subject sequence, also referred to as a global sequence alignment, can be determined using the FASTDB computer program based on the algorithm of Brutlag et al. (Comp. App. Biosci.6:237-245 (1990)). In a sequence alignment the query and subject sequences are either both nucleotide sequences or both amino acid sequences. The result of said global sequence alignment is expressed as percent identity. Preferred parameters used in a FASTDB amino acid alignment are: Matrix=PAM 0, k-tuple=2, Mismatch Penalty=1, Joining Penalty=20, Randomization Group Length=0, Cutoff Score=1, Window Size=sequence length, Gap Penalty=5, Gap Size Penalty=0.05, Window Size=500 or the length of the subject amino acid sequence, whichever is shorter.

[0121] If the subject sequence is shorter than the query sequence due to N- or C-terminal deletions, not because of internal deletions, a manual correction must be made to the results. This is because the FASTDB program does not account for N- and C-terminal truncations of the subject sequence when calculating global percent identity. For subject sequences truncated at the N- and C-termini, relative to the query sequence, the percent identity is corrected by calculating the number of residues of the query sequence that are N- and C-terminal of the subject sequence, which are not matched/aligned with a corresponding subject residue, as a percent of the total bases of the query sequence. Whether a residue is matched/aligned is determined by results of the FASTDB sequence alignment. This percentage is then subtracted from the percent identity, calculated by the above FASTDB program using the specified parameters, to arrive at a final percent identity score. This final percent identity score is what is used for the purposes of the present invention. Only residues to the N- and C-termini of the subject sequence, which are not matched/aligned with the query sequence, are considered for the purposes of manually adjusting the percent identity score. That is, only query residue positions outside the farthest N- and C-terminal residues of the subject sequence.

[0122] For example, a 90 amino acid residue subject sequence is aligned with a 100 residue query sequence to determine percent identity. The deletion occurs at the N-terminus of the subject sequence and therefore, the FASTDB alignment does not show a matching alignment of the first 10 residues at the N-terminus. The 10 unpaired residues represent 10% of the sequence (number of residues at the N- and C-termini not matched/total number of residues in the query sequence) so 10% is subtracted from the percent identity score calculated by the FASTDB program. If the remaining 90 residues were perfectly matched the final percent identity would be 90%. In another example, a 90 residue subject sequence is compared with a 100 residue query sequence. This time the deletions are internal deletions so there are no residues at the N- or C-termini of the subject sequence which are not matched/aligned with the query. In this case the percent identity calculated by FASTDB is not manually corrected. Once again, only residue positions outside the N- and C-terminal ends of the subject sequence, as displayed in the FASTDB alignment, which are not matched/aligned with the query sequence are manually corrected for. No other manual corrections are to made for the purposes of the present invention.

[0123] The polynucleotide variants of the invention may contain alterations in the coding regions, non-coding regions, or both. Especially preferred are polynucleotide variants containing alterations which produce silent substitutions, additions, or deletions, but do not alter the properties or activities of the encoded polypeptide. Nucleotide variants produced by silent substitutions due to the degeneracy of the genetic code are preferred. Moreover, polypeptide variants in which less than 50, less than 40, less than 30, less than 20, less than 10, or 5-50, 5-25, 5-10, 1-5, or 1-2 amino acids are substituted, deleted, or added in any combination are also preferred. Polynucleotide variants can be produced for a variety of reasons, e.g., to optimize codon expression for a particular host (change codons in the human mRNA to those preferred by a bacterial host such as E. coli).

[0124] Naturally occurring variants are called “allelic variants,” and refer to one of several alternate forms of a gene occupying a given locus on a chromosome of an organism. (Genes II, Lewin, B., ed., John Wiley & Sons, New York (1985).) These allelic variants can vary at either the polynucleotide and/or polypeptide level and are included in the present invention. Alternatively, non-naturally occurring variants may be produced by mutagenesis techniques or by direct synthesis.

[0125] Using known methods of protein engineering and recombinant DNA technology, variants may be generated to improve or alter the characteristics of the polypeptides of the present invention. For instance, one or more amino acids can be deleted from the N-terminus or C-terminus of the polypeptides of the present invention without substantial loss of biological function. As an example, the authors of Ron et al., J. Biol. Chem. 268: 2984-2988 (1993), reported variant KGF proteins having heparin binding activity even after deleting 3, 8, or 27 amino-terminal amino acid residues. Similarly, Interferon gamma exhibited up to ten times higher activity after deleting 8-10 amino acid residues from the carboxy terminus of this protein. (Dobeli et al., J. Biotechnology 7:199-216 (1988).)

[0126] Moreover, ample evidence demonstrates that variants often retain a biological activity similar to that of the naturally occurring protein. For example, Gayle and coworkers (J. Biol. Chem. 268:22105-22111 (1993)) conducted extensive mutational analysis of human cytokine IL-1a. They used random mutagenesis to generate over 3,500 individual IL-1 a mutants that averaged 2.5 amino acid changes per variant over the entire length of the molecule. Multiple mutations were examined at every possible amino acid position. The investigators found that “[m]ost of the molecule could be altered with little effect on either [binding or biological activity].” In fact, only 23 unique amino acid sequences, out of more than 3,500 nucleotide sequences examined, produced a protein that significantly differed in activity from wild-type.

[0127] Furthermore, even if deleting one or more amino acids from the N-terminus or C-terminus of a polypeptide results in modification or loss of one or more biological functions, other biological activities may still be retained. For example, the ability of a deletion variant to induce and/or to bind antibodies which recognize the secreted form will likely be retained when less than the majority of the residues of the secreted form are removed from the N-terminus or C-terminus. Whether a particular polypeptide lacking N- or C-terminal residues of a protein retains such immunogenic activities can readily be determined by routine methods described herein and otherwise known in the art.

[0128] Thus, the invention further includes polypeptide variants which show a functional activity (e.g., biological activity) of the polypeptides of the invention. Such variants include deletions, insertions, inversions, repeats, and substitutions selected according to general rules known in the art so as have little effect on activity.

[0129] The present application is directed to nucleic acid molecules at least 80%, 85%, 90%, 95%, 96%, 97%, 98%, 99% or 100% identical to the nucleic acid sequences disclosed herein, (e.g., encoding a polypeptide having the amino acid sequence of an N and/or C terminal deletion), irrespective of whether they encode a polypeptide having functional activity. This is because even where a particular nucleic acid molecule does not encode a polypeptide having functional activity, one of skill in the art would still know how to use the nucleic acid molecule, for instance, as a hybridization probe or a polymerase chain reaction (PCR) primer. Uses of the nucleic acid molecules of the present invention that do not encode a polypeptide having functional activity include, inter alia, (1) isolating a gene or allelic or splice variants thereof in a cDNA library; (2) in situ hybridization (e.g., “FISH”) to metaphase chromosomal spreads to provide precise chromosomal location of the gene, as described in Verma et al., Human Chromosomes: A Manual of Basic Techniques, Pergamon Press; New York (1988); (3) Northern Blot analysis for detecting mRNA expression in specific tissues (e.g., normal endocrine or diseased endocrine tissues); and (4) in situ hybridization (e.g., histochemistry) for detecting mRNA expression in specific tissues (e.g., normal endocrine or diseased endocrine tissues).

[0130] Preferred, however, are nucleic acid molecules having sequences at least 80%, 85%, 90%, 95%, 96%, 97%, 98%, 99% or 100% identical to the nucleic acid sequences disclosed herein, which do, in fact, encode a polypeptide having functional activity. By a polypeptide having “functional activity” is meant, a polypeptide capable of displaying one or more known functional activities associated with a full-length (complete) protein of the invention. Such functional activities include, but are not limited to, biological activity, antigenicity [ability to bind (or compete with a polypeptide of the invention for binding) to an anti-polypeptide of the invention antibody], immunogenicity (ability to generate antibody which binds to a specific polypeptide of the invention), ability to form multimers with polypeptides of the invention, and ability to bind to a receptor or ligand for a polypeptide of the invention.

[0131] The functional activity of the polypeptides, and fragments, variants and derivatives of the invention, can be assayed by various methods.

[0132] For example, in one embodiment where one is assaying for the ability to bind or compete with full-length polypeptide of the present invention for binding to an anti-polypeptide of the invention antibody, various immunoassays known in the art can be used, including but not limited to, competitive and non-competitive assay systems using techniques such as radioimmunoassays, ELISA (enzyme linked immunosorbent assay), “sandwich” immunoassays, immunoradiometric assays, gel diffusion precipitation reactions, immunodiffusion assays, in situ immunoassays (using colloidal gold, enzyme or radioisotope labels, for example), western blots, precipitation reactions, agglutination assays (e.g., gel agglutination assays, hemagglutination assays), complement fixation assays, immunofluorescence assays, protein A assays, and immunoelectrophoresis assays, etc. In one embodiment, antibody binding is detected by detecting a label on the primary antibody. In another embodiment, the primary antibody is detected by detecting binding of a secondary antibody or reagent to the primary antibody. In a further embodiment, the secondary antibody is labeled. Many means are known in the art for detecting binding in an immunoassay and are within the scope of the present invention.

[0133] In another embodiment, where a ligand is identified, or the ability of a polypeptide fragment, variant or derivative of the invention to multimerize is being evaluated, binding can be assayed, e.g., by means well-known in the art, such as, for example, reducing and non-reducing gel chromatography, protein affinity chromatography, and affinity blotting. See generally, Phizicky et al., Microbiol. Rev. 59:94-123 (1995). In another embodiment, the ability of physiological correlates of a polypeptide of the present invention to bind to a substrate(s) of the polypeptide of the invention can be routinely assayed using techniques known in the art.

[0134] In addition, assays described herein (see Examples) and otherwise known in the art may routinely be applied to measure the ability of polypeptides of the present invention and fragments, variants and derivatives thereof to elicit polypeptide related biological activity (either in vitro or in vivo). Other methods will be known to the skilled artisan and are within the scope of the invention.

[0135] Of course, due to the degeneracy of the genetic code, one of ordinary skill in the art will immediately recognize that a large number of the nucleic acid molecules having a sequence at least 80%, 85%, 90%, 95%, 96%, 97%, 98%, 99%, or 100% identical to, for example, the nucleic acid sequence of the cDNA contained in Clone ID NO:Z, a nucleic acid sequence referred to in Table 1A (e.g., SEQ ID NO:X), a nucleic acid sequence disclosed in Table 2 (e.g., the nucleic acid sequence delineated in columns 8 and 9) or fragments thereof, will encode polypeptides “having functional activity.” In fact, since degenerate variants of any of these nucleotide sequences all encode the same polypeptide, in many instances, this will be clear to the skilled artisan even without performing the above described comparison assay. It will be further recognized in the art that, for such nucleic acid molecules that are not degenerate variants, a reasonable number will also encode a polypeptide having functional activity. This is because the skilled artisan is fully aware of amino acid substitutions that are either less likely or not likely to significantly effect protein function (e.g., replacing one aliphatic amino acid with a second aliphatic amino acid), as further described below.

[0136] For example, guidance concerning how to make phenotypically silent amino acid substitutions is provided in Bowie et al., “Deciphering the Message in Protein Sequences: Tolerance to Amino Acid Substitutions,” Science 247:1306-1310 (1990), wherein the authors indicate that there are two main strategies for studying the tolerance of an amino acid sequence to change.

[0137] The first strategy exploits the tolerance of amino acid substitutions by natural selection during the process of evolution. By comparing amino acid sequences in different species, conserved amino acids can be identified. These conserved amino acids are likely important for protein function. In contrast, the amino acid positions' where substitutions have been tolerated by natural selection indicates that these positions are not critical for protein function. Thus, positions tolerating amino acid substitution could be modified while still maintaining biological activity of the protein.

[0138] The second strategy uses genetic engineering to introduce amino acid changes at specific positions of a cloned gene to identify regions critical for protein function. For example, site directed mutagenesis or alanine-scanning mutagenesis (introduction of single alanine mutations at every residue in the molecule) can be used. See Cunningham et al., Science 244:1081-1085 (1989). The resulting mutant molecules can then be tested for biological activity.

[0139] As the authors state, these two strategies have revealed that proteins are surprisingly tolerant of amino acid substitutions. The authors further indicate which amino acid changes are likely to be permissive at certain amino acid positions in the protein. For example, most buried (within the tertiary structure of the protein) amino acid residues require nonpolar side chains, whereas few features of surface side chains are generally conserved. Moreover, tolerated conservative amino acid substitutions involve replacement of the aliphatic or hydrophobic amino acids Ala, Val, Leu and Ile; replacement of the hydroxyl residues Ser and Thr; replacement of the acidic residues Asp and Glu; replacement of the amide residues Asn and Gln, replacement of the basic residues Lys, Arg, and His; replacement of the aromatic residues Phe, Tyr, and Trp, and replacement of the small-sized amino acids Ala, Ser, Thr, Met, and Gly. Besides conservative amino acid substitutions, variants of the present invention include (i) substitutions with one or more of the non-conserved amino acid residues, where the substituted amino acid residues may or may not be one encoded by the genetic code, or (ii) substitutions with one or more of the amino acid residues having a substituent group, or (iii) fusion of the mature polypeptide with another compound, such as a compound to increase the stability and/or solubility of the polypeptide (for example, polyethylene glycol), or (iv) fusion of the polypeptide with additional amino acids, such as, for example, an IgG Fc fusion region peptide, serum albumin (preferably human serum albumin) or a fragment or variant thereof, or leader or secretory sequence, or a sequence facilitating purification. Such variant polypeptides are deemed to be within the scope of those skilled in the art from the teachings herein.

[0140] For example, polypeptide variants containing amino acid substitutions of charged amino acids with other charged or neutral amino acids may produce proteins with improved characteristics, such as less aggregation. Aggregation of pharmaceutical formulations both reduces activity and increases clearance due to the aggregate's immunogenic activity. See Pinckard et al., Clin. Exp. Immunol. 2:331-340 (1967); Robbins et al., Diabetes 36: 838-845 (1987); Cleland et al., Crit. Rev. Therapeutic Drug Carrier Systems 10:307-377 (1993).

[0141] A further embodiment of the invention relates to polypeptides which comprise the amino acid sequence of a polypeptide having an amino acid sequence which contains at least one amino acid substitution, but not more than 50 amino acid substitutions, even more preferably, not more than 40 amino acid substitutions, still more preferably; not more than 30 amino acid substitutions, and still even more preferably, not more than 20 amino acid substitutions from a polypeptide sequence disclosed herein. Of course it is highly preferable for a polypeptide to have an amino acid sequence which comprises the amino acid sequence of a polypeptide of SEQ ID NO:Y, an amino acid sequence encoded by SEQ ID NO:X, an amino acid sequence encoded by the portion of SEQ ID NO:X as defined in columns 8 and 9 of Table 2, an amino acid sequence encoded by the complement of SEQ ID NO:X, and/or the amino acid sequence encoded by cDNA contained in Clone ID NO:Z which contains, in order of ever-increasing preference, at least one, but not more than 10, 9, 8, 7, 6, 5, 4, 3, 2 or 1 amino acid substitutions.

[0142] In specific embodiments, the polypeptides of, the invention comprise, or alternatively, consist of, fragments or variants of a reference amino acid sequence selected from: (a) the amino acid sequence of SEQ ID NO:Y or fragments thereof (e.g., the mature form and/or other fragments described herein); (b) the amino acid sequence encoded by SEQ ID NO:X or fragments thereof, (c) the amino acid sequence encoded by the complement of SEQ ID NO:X or fragments thereof, (d) the amino acid sequence encoded by the portion of SEQ ID NO:X as defined in columns 8 and 9 of Table 2 or fragments thereof; and (e) the amino acid sequence encoded by cDNA contained in Clone ID NO:Z or fragments thereof, wherein the fragments or variants have 1-5,5-10, 5-25, 5-50, 10-50 or 50-150, amino acid residue additions, substitutions, and/or deletions when compared to the reference amino acid sequence. In preferred embodiments, the amino acid substitutions are conservative. Polynucleotides encoding these polypeptides are also encompassed by the invention.

[0143] Polynucleotide and Polypeptide Fragments

[0144] The present invention is also directed to polynucleotide fragments of the polynucleotides (nucleic acids) of the invention. In the present invention, a “polynucleotide fragment” refers to a polynucleotide having a nucleic acid sequence which, for example: is a portion of the cDNA contained in Clone ID NO:Z or the complementary strand thereto; is a portion of the polynucleotide sequence encoding the polypeptide encoded by the cDNA contained in Clone ID NO:Z or the complementary strand thereto; is a portion of a polynucleotide sequence encoding the amino acid sequence encoded by the region of SEQ ID NO:X as defined in columns 8 and 9 of Table 2 or the complementary strand thereto; is a portion of the polynucleotide sequence of SEQ ID NO:X as defined in columns 8 and 9 of Table 2 or the complementary strand thereto; is a portion of the polynucleotide sequence in SEQ ID NO:X or the complementary strand thereto; is a polynucleotide sequence encoding a portion of the polypeptide of SEQ ID NO:Y; is a polynucleotide sequence encoding a portion of a polypeptide encoded by SEQ ID NO:X; is a polynucleotide sequence encoding a portion of a polypeptide encoded by the complement of the polynucleotide sequence in SEQ ID NO:X; is a portion of a polynucleotide sequence encoding the amino acid sequence encoded by the region of SEQ ID NO:B as defined in column 6 of Table 1B or the complementary strand thereto; or is a portion of the polynucleotide sequence of SEQ ID NO:B as defined in column 6 of Table 1B or the complementary strand thereto.

[0145] The polynucleotide fragments of the invention are preferably at least about 15 nt, and more preferably at least about 20 nt, still more preferably at least about 30 nt, and even more preferably, at least about 40 nt, at least about 50 nt, at least about 75 nt, or at least about 150 nt in length. A fragment “at least 20 nt in length,” for example, is intended to include 20 or more contiguous bases from the cDNA sequence contained in Clone ID NO:Z, or the nucleotide sequence shown in SEQ ID NO:X or the complementary stand thereto. In this context “about” includes the particularly recited value or a value larger or smaller by several (5, 4, 3, 2, or 1) nucleotides, at either terminus or at both termini. These nucleotide fragments have uses that include, but are not limited to, as diagnostic probes and primers as discussed herein. Of course, larger fragments (e.g., at least 160, 170, 180, 190, 200, 250, 500, 600, 1000, or 2000 nucleotides in length) are also encompassed by the invention.

[0146] Moreover, representative examples of polynucleotide fragments of the invention, comprise, or alternatively consist of, a sequence from about nucleotide number 1-50, 51-100, 101-150, 151-200, 201-250, 251-300, 301-350, 351-400, 401-450, 451-500, 501-550, 551-600, 651-700, 701-750, 751-800, 800-850, 851-900, 901-950, 951-1000, 1001-1050, 1051-1100, 1101-1150, 1151-1200, 1201-1250, 1251-1300, 1301-1350, 1351-1400, 1401-1450, 1451-1500, 1501-1550, 1551-1600, 1601-1650, 1651-1700, 1701-1750, 1751-1800, 1801-1850, 1851-1900, 1901-1950, 1951-2000, 2001-20-50, 2051-2100, 2101-2150, 2151-2200, 2201-2250, 2251-2300, 2301-2350, 2351-2400, 2401-2450, 2451-2500, 2501-2550, 2551-2600, 2601-2650, 2651-2700, 2701-2750, 2751-2800, 2801-2850, 2851-2900, 2901-2950, 2951-3000, 3001-3050, 3051-3100, 3101-3150, 3151-3200, 3201-3250, 3251-3300, 3301-3350, 3351-3400, 3401-3450, 3451-3500, 3501-3550, 3551-3600, 3601-3650, 3651-3700, 3701-3750, 3751-3800, 3801-3850, 3851-3900, 3901-3950, 3951-4000, 4001-4050, 4051-4100, 4101-4150, 4151-4200, 4201-4250, 4251-4300, 4301-4350, 4351-4400, 4401-4450, 4451-4500, 4501-4550, 4551-4600, 4601-4650, 4651-4700, 4701-4750, 4751-4800, 4801-4850, 4851-4900, 4901-4950, 4951-5000, 5001-5050, 5051-5100, 5101-5150, 5151-5200, 5201-5250, 5251-5300, 5301-5350, 5351-5400, 5401-5450, 5451-5500, 5501-5550, 5551-5600, 5601-5650, 5651-5700, 5701-5750, 5751-5800, 5801-5850, 5851-5900, 5901-5950, 5951-6000, 6001-6050, 6051-6100, 6101-6150, 6151-6200, 6201-6250, 6251-6300, 6301-6350, 6351-6400, 6401-6450, 6451-6500, 6501-6550, 6551-6600, 6601-6650, 6651-6700, 6701-6750, 6751-6800, 6801-6850, 6851-6900, 6901-6950, 6951-7000, 7001-7050, 7051-7100, 7101-7150, 7151-7200, 7201-7250, 7251-7300 or 7301 to the end of SEQ ID NO:X, or the complementary strand thereto. In this context “about” includes the particularly recited range or a range larger or smaller by several (5, 4, 3, 2, or 1) nucleotides, at either terminus or at both termini. Preferably, these fragments encode a polypeptide which has a functional activity (e.g., biological activity). More preferably, these polynucleotides can be used as probes or primers as discussed herein. Polynucleotides which hybridize to one or more of these polynucleotides under stringent hybridization conditions or alternatively, under lower stringency conditions are also encompassed by the invention, as are polypeptides encoded by these polynucleotides.

[0147] Further representative examples of polynucleotide fragments of the invention, comprise, or alternatively consist of, a sequence from about nucleotide number 1-50, 51-100, 101-150, 151-200, 201-250, 251-300, 301-350, 351-400, 401-450, 451-500, 501-550, 551-600, 651-700, 701-750, 751-800, 800-850, 851-900, 901-950, 951-1000, 1001-1050, 1051-1-100, 1101-1150, 1151-1200, 1201-1250, 1251-1300, 1301-1350, 1351-1400, 1401-1450, 1451-1500, 1501-1550, 1551-1600, 1601-1650, 1651-1700, 1701-1750, 1751-1800, 1801-1850, 1851-1900, 1901-1950, 1951-2000, 2001-2050, 2051-2100, 2101-2150, 2151-2200, 2201-2250, 2251-2300, 2301-2350, 2351-2400, 2401-2450, 2451-2500, 2501-2550, 2551-2600, 2601-2650, 2651-2700, 2701-2750, 2751-2800, 2801-2850, 2851-2900, 2901-2950, 2951-3000, 3001-3050, 3051-3100, 3101-3150, 3151-3200, 3201-3250, 3251-3300, 3301-3350, 3351-3400, 3401-3450, 3451-3500, 3501-3550, 3551-3600, 3601-3650, 3651-3700, 3701-3750, 3751-3800, 3801-3850, 3851-3900, 3901-3950, 3951-4000, 4001-4050, 4051-4100, 4101-4150, 4151-4200, 4201-4250, 4251-4300, 4301-4350, 4351-4400, 4401-4450, 4451-4500, 4501-4550, 4551-4600, 4601-4650, 4651-4700, 4701-4750, 4751-4800, 4801-4850, 4851-4900, 4901-4950, 4951-5000, 5001-5050, 5051-5100, 5101-5150, 5151-5200, 5201-5250, 5251-5300, 5301-5350, 5351-5400, 5401-5450, 5451-5500, 5501-5550, 5551-5600, 5601-5650, 5651-5700, 5701-5750, 5751-5800, 5801-5850, 5851-5900, 5901-5950, 5951-6000, 6001-6050, 6051-6100, 6101-6150, 6151-6200; 6201-6250, 6251-6300, 6301-6350, 6351-6400, 6401-6450, 6451-6500, 6501-6550, 6551-6600, 6601-6650, 6651-6700, 6701-6750, 6751-6800, 6801-6850, 6851-6900, 6901-6950, 6951-7000, 7001-7050, 7051-7100, 7101-7150, 7151-7200, 7201-7250, 7251-7300 or 7301 to the end of the cDNA sequence contained in Clone ID NO:Z, or the complementary strand thereto. In this context “about” includes the particularly recited range or a range larger or smaller by several (5, 4, 3, 2, or 1) nucleotides, at either terminus or at both termini. Preferably, these fragments encode a polypeptide which has a functional activity (e.g., biological activity). More preferably, these polynucleotides can be used as probes or primers as discussed herein. Polynucleotides which hybridize to one or more of these polynucleotides under stringent hybridization conditions or alternatively, under lower stringency conditions are also encompassed by the invention, as are polypeptides encoded by these polynucleotides.

[0148] Moreover, representative examples of polynucleotide fragments of the invention comprise, or alternatively consist of, a nucleic acid sequence comprising one, two, three, four, five, six, seven, eight, nine, ten, or more of the above described polynucleotide fragments of the invention in combination with a polynucleotide sequence delineated in Table 1B column 6. Additional, representative examples of polynucleotide fragments of the invention comprise, or alternatively consist of, a nucleic acid sequence comprising one, two, three, four, five, six, seven, eight, nine, ten, or more of the above described polynucleotide fragments of the invention in combination with a polynucleotide sequence that is the complementary strand of a sequence delineated in column 6 of Table 1B. In further embodiments, the above-described polynucleotide fragments of the invention comprise, or alternatively consist of, sequences delineated in Table 1B, column 6; and have a nucleic acid sequence which is different from that of the BAC fragment having the sequence disclosed in SEQ ID NO:B (see Table 1B, column 5). In additional embodiments, the above-described polynucleotide fragments of the invention comprise, or alternatively consist of, sequences delineated in Table 1B, column 6, and have a nucleic acid sequence which is different from that published for the BAC clone identified as BAC ID NO:A (see Table 1B, column 4). In additional embodiments, the above-described polynucleotides of the invention comprise, or alternatively consist of, sequences delineated Table 1B, column 6, and have a nucleic acid sequence which is different from that contained in the BAC clone identified as BAC ID NO:A (see Table 1B, column 4). Polypeptides encoded by these polynucleotides, other polynucleotides that encode these polypeptides, and antibodies that bind these polypeptides are also encompassed by the invention. Additionally, fragments and variants of the above-described polynucleotides and polypeptides are also encompassed by the invention.

[0149] In additional specific embodiments, polynucleotides of the invention comprise, or alternatively consist of, one, two, three, four, five, six, seven, eight, nine, ten, or more fragments of the sequences delineated in column 6 of Table 1B, and the polynucleotide sequence of SEQ ID NO:X (e.g., as defined in Table 1B, column 2) or fragments or variants thereof. Polypeptides encoded by these polynucleotides, other polynucleotides that encode these polypeptides, and antibodies that bind these polypeptides are also encompassed by the invention.

[0150] In additional specific embodiments, polynucleotides of the invention comprise, or alternatively consist of, one, two, three, four, five, six, seven, eight, nine, ten, or more fragments of the sequences delineated in column 6 of Table 1B which correspond to the same Clone ID NO:Z (see Table 1B, column 1), and the polynucleotide sequence of SEQ ID NO:X (e.g., as defined in Table 1A or 1B) or fragments or variants thereof. Polypeptides encoded by these polynucleotides, other polynucleotides that encode these polypeptides, and antibodies that bind these polypeptides are also encompassed by the invention.

[0151] In further specific embodiments, polynucleotides of the invention comprise, or alternatively consist of, one, two, three, four, five, six, seven, eight, nine, ten, or more fragments of the sequences delineated in the same row of column 6 of Table 1B, and the polynucleotide sequence of SEQ ID NO:X (e.g., as defined in Table 1A or 1B) or fragments or variants thereof. Polypeptides encoded by these polynucleotides, other polynucleotides that encode these polypeptides, and antibodies that bind these polypeptides are also encompassed by the invention.

[0152] In additional specific embodiments, polynucleotides of the invention comprise, or alternatively consist of a polynucleotide sequence in which the 3′ 10 polynucleotides of one of the sequences delineated in column 6 of Table 1B and the 5′ 10 polynucleotides of the sequence of SEQ ID NO:X are directly contiguous. Nucleic acids which hybridize to the complement of these 20 contiguous polynucleotides under stringent hybridization conditions or alternatively, under lower stringency conditions, are also encompassed by the invention. Polypeptides encoded by these polynucleotides and/or nucleic acids, other polynucleotides and/or nucleic acids that encode these polypeptides, and antibodies that bind these polypeptides are also encompassed by the invention. Additionally, fragments and variants of the above-described polynucleotides, nucleic acids, and polypeptides are also encompassed by the invention.

[0153] In additional specific embodiments, polynucleotides of the invention comprise, or alternatively consist of a polynucleotide sequence in which the 3′ 10 polynucleotides of one-of the sequences delineated in column 6 of Table 1B and the 5′ 10 polynucleotides of a fragment or variant of the sequence of SEQ ID NO:X (e.g., as described herein) are directly contiguous Nucleic acids which hybridize to the complement of these 20 contiguous polynucleotides under stringent hybridization conditions or alternatively, under lower stringency conditions, are also encompassed by the invention. Polypeptides encoded by these polynucleotides and/or nucleic acids, other polynucleotides and/or nucleic acids encoding these polypeptides, and antibodies that bind these polypeptides are also encompassed by the invention. Additionally, fragments and variants of the above-described polynucleotides, nucleic acids, and polypeptides are also encompassed by the invention.

[0154] In further specific embodiments, polynucleotides of the invention comprise, or alternatively consist of a polynucleotide sequence in which the 3′ 10 polynucleotides of a fragment or variant of the sequence of SEQ ID NO:X and the 5′ 10 polynucleotides of the sequence of one of the sequences delineated in column 6 of Table 1B are directly contiguous. Nucleic acids which hybridize to the complement of these 20 contiguous polynucleotides under stringent hybridization conditions or alternatively, under lower stringency conditions, are also encompassed by the invention. Polypeptides encoded by these polynucleotides and/or nucleic acids, other polynucleotides and/or nucleic acids encoding these polypeptides, and antibodies that bind these polypeptides are also encompassed by the invention. Additionally, fragments and variants of the above-described polynucleotides, nucleic acids, and polypeptides are also encompassed by the invention.

[0155] In specific embodiments, polynucleotides of the invention comprise, or alternatively consist of a polynucleotide sequence in which the 3′ 10 polynucleotides of one of the sequences delineated in column 6 of Table 1B and the 5′ 10 polynucleotides of another sequence in column 6 are directly contiguous. In preferred embodiments, the 3′ 10 polynucleotides of one of the sequences delineated in column 6 of Table 1B is directly contiguous with the 5′ 10 polynucleotides of the next sequential exon delineated in Table 1B, column 6. Nucleic acids which hybridize to the complement of these 20 contiguous polynucleotides under stringent hybridization conditions or alternatively, under lower stringency conditions, are also encompassed by the invention. Polypeptides encoded by these polynucleotides and/or nucleic acids, other polynucleotides and/or nucleic acids encoding these polypeptides, and antibodies that bind these polypeptides are also encompassed by the invention. Additionally, fragments and variants of the above-described polynucleotides, nucleic acids, and polypeptides are also encompassed by the invention.

[0156] In the present invention, a “polypeptide fragment” refers to an amino acid sequence which is a portion of that contained in SEQ ID NO:Y, a portion of an amino acid sequence encoded by the portion of SEQ ID NO:X as defined in columns 8 and 9 of Table 2, a portion of an amino acid sequence encoded by the polynucleotide sequence of SEQ ID NO:X, a portion of an amino acid sequence encoded by the complement of the polynucleotide sequence in SEQ ID NO:X, and/or a portion of an amino acid sequence encoded by the cDNA contained in Clone ID NO:Z. Protein (polypeptide) fragments may be “free-standing,” or comprised within a larger polypeptide of which the fragment forms a part or region, most preferably as a single continuous region. Representative examples of polypeptide fragments of the invention, include, for example, fragments comprising, or alternatively consisting of, from about amino acid number 1-20, 21-40, 41-60, 61-80, 81-100, 102-120, 121-140, 141-160, 161-180, 181-200, 201-220, 221-240, 241-260, 261-280, 281-300, 301-320, 321-340, 341-360, 361-380, 381-400, 401-420, 421-440, 441-460, 461-480, 481-500, 501-520, 521-540, 541-560, 561-580, 581-600, 601-620, 621-640, 641-660, 661-680, 681-700, 701-720, 721-740, 741-760, 761-780, 781-800, 801-820, 821-840, 841-860, 861-880, 881-900, 901-920, 921-940, 941-960, 961-980, 981-1000, 1001-1020, 1021-1040, 1041-1060, 1061-1080; 1081-1100, 1101-1120, 1121-1140, 1141-1160, 1161-1180, 1181-1200, 1201-1220, 1221-1240, 1241-1260, 1261-1280, 1281-1300, 1301-1320, 1321-1340, 1341-1360, 1361-1380, 1381-1400, 1401-1420, 1421-1440, or 1441 to the end of the coding region. In a preferred embodiment, polypeptide fragments of the invention include, for example, fragments comprising, or alternatively consisting of, from about amino acid number 1-20, 21-40, 41-60, 61-80, 81-100, 102-120, 121-140, 141-160, 161-180, 181-200, 201-220, 221-240, 241-260, 261-280, 281-300, 301-320, 321-340, 341-360, 361-380, 381-400, 401-420, 421-440, 441-460, 461-480, 481-500, 501-520, 521-540, 541-560, 561-580, 581-600, 601-620, 621-640, 641-660, 661-680, 681-700, 701-720, 721-740, 741-760, 761-780, 781-800, 801-820, 821-840, 841-860, 861-880, 881-900, 901-920, 921-940, 941-960, 961-980, 981-1000, 1001-1020, 1021-1040, 1041-1060, 1061-1080, 1081-1100, 1101-1120, 1121-1140, 1141-1160, 1161-1180, 1181-1200, 1201-1220, 1221-1240, 1241-1260, 1261-1280, 1281-1300, 1301-1320, 1321-1340, 1341-1360, 1361-1380, 1381-1400, 1401-1420, 1421-1440, or 1441 to the end of the coding region of SEQ ID NO:Y. Moreover, polypeptide fragments of the invention may be at least about 10, 15, 20, 25, 30, 35, 40, 45, 50, 55, 60, 65, 70, 75, 80, 85, 90, 100, 110, 120, 130, 140, or 150 amino acids in length. In this context “about” includes the particularly recited ranges or values, or ranges or values larger or smaller by several (5, 4, 3, 2, or 1) amino acids, at either extreme or at both extremes. Polynucleotides encoding these polypeptide fragments are also encompassed by the invention.

[0157] Even if deletion of one or more amino acids from the N-terminus of a protein results in modification of loss of one or more biological functions of the protein, other functional activities (e.g., biological activities, ability to multimerize, ability to bind a ligand) may still be retained. For example, the ability of shortened muteins to induce and/or bind to antibodies which recognize the complete or mature forms of the polypeptides generally will be retained when less than the majority of the residues of the complete or mature polypeptide are removed from the N-terminus. Whether a particular polypeptide lacking N-terminal residues of a complete polypeptide retains such immunologic activities can readily be determined by routine methods described herein and otherwise known in the art. It is not unlikely that a mutein with a large number of deleted N-terminal amino acid residues may retain some biological or immunogenic activities. In fact, peptides composed of as few as six amino acid residues may often evoke an immune response.

[0158] Accordingly, polypeptide fragments include the secreted protein as well as the mature form. Further preferred polypeptide fragments include the secreted protein or the mature form having a continuous series of deleted residues from the amino or the carboxy terminus, or both. For example, any number of amino acids, ranging from 1-60, can be deleted from the amino terminus of either the secreted polypeptide or the mature form. Similarly, any number of amino acids, ranging from 1-30, can be deleted from the carboxy terminus of the secreted protein or mature form. Furthermore, any combination of the above amino and carboxy terminus deletions are preferred. Similarly, polynucleotides encoding these polypeptide fragments are also preferred.

[0159] The present invention further provides polypeptides having one or more residues deleted from the amino terminus of the amino acid sequence of a polypeptide disclosed herein (e.g., a polypeptide of SEQ ID NO:Y, a polypeptide encoded by the polynucleotide sequence contained in SEQ ID NO:X or the complement thereof, a polypeptide encoded by the portion of SEQ ID NO:X as defined in columns 8 and 9 of Table 2, a polypeptide encoded by the portion of SEQ ID NO:B as defined in column 6 of Table 1B, and/or a polypeptide encoded by the cDNA contained in Clone ID NO:Z). In particular, N-terminal deletions may be described by the general formula m-q, where q is a whole integer representing the total number of amino acid residues in a polypeptide of the invention (e.g., the polypeptide disclosed in SEQ ID NO:Y, or the polypeptide encoded by the portion of SEQ ID NO:X as defined in columns 8 and 9 of Table 2), and m is defined as any integer ranging from 2 to q-6. Polynucleotides encoding these polypeptides are also encompassed by the invention.

[0160] The present invention further provides polypeptides having one or more residues from the carboxy terminus of the amino acid sequence of a polypeptide disclosed herein (e.g., a polypeptide of SEQ ID NO:Y, a polypeptide encoded by the polynucleotide sequence contained in SEQ ID NO:X, a polypeptide encoded by the portion of SEQ ID NO:X as defined in columns 8 and 9 of Table 2, and/or a polypeptide encoded by the cDNA contained in Clone ID NO:Z). In particular, C-terminal deletions may be described by the general formula 1-n, where n is any whole integer ranging from 6 to q-1, and where n corresponds to the position of amino acid residue in a polypeptide of the invention. Polynucleotides encoding these polypeptides are also encompassed by the invention.

[0161] In addition, any of the above described N- or C-terminal deletions can be combined to produce a N- and C-terminal deleted polypeptide. The invention also provides polypeptides having one or more amino acids deleted from both the amino and the carboxyl termini, which may be described generally as having residues m-n of a polypeptide encoded by SEQ ID NO:X (e.g., including, but not limited to, the preferred polypeptide disclosed as SEQ ID NO:Y and the polypeptide encoded by the portion of SEQ ID NO:X as defined in columns 8 and 9 of Table 2), the cDNA contained in Clone ID NO:Z, and/or the complement thereof, where n and m are integers as described above. Polynucleotides encoding these polypeptides are also encompassed by the invention.

[0162] Also as mentioned above, even if deletion of one or more amino acids from the C-terminus of a protein results in modification of loss of one or more biological functions of the protein, other functional activities (e.g., biological activities, ability to multimerize, ability to bind a ligand) may still be retained. For example the ability of the shortened mutein to induce and/or bind to antibodies which recognize the complete or mature forms of the polypeptide generally will be retained when less than the majority of the residues of the complete or mature polypeptide are removed from the C-terminus. Whether a particular polypeptide lacking C-terminal residues of a complete polypeptide retains such immunologic activities can readily be determined by routine methods described herein and otherwise known in the art. It is not unlikely that a mutein with a large number of deleted C-terminal amino acid residues may retain some biological or immunogenic activities. In fact, peptides composed of as few as six amino acid residues may often evoke an immune response.

[0163] The present application is also directed to proteins containing polypeptides at least 80%, 85%, 90%, 95%, 96%, 97%, 98% or 99% identical to a polypeptide sequence set forth herein. In preferred embodiments, the application is directed to proteins containing polypeptides at least 80%, 85%, 90%, 95%, 96%, 97%, 98% or 99% identical to polypeptides having the amino acid sequence of the specific N- and C-terminal deletions. Polynucleotides encoding these polypeptides are also encompassed by the invention.

[0164] Any polypeptide sequence encoded by, for example, the polynucleotide sequences set forth as SEQ ID NO:X or the complement thereof, (presented, for example, in Tables 1A and 2), the cDNA contained in Clone ID NO:Z, or the polynucleotide sequence as defined in column 6 of Table 1B, may be analyzed to determine certain preferred regions of the polypeptide. For example, the amino acid sequence of a polypeptide encoded by a polynucleotide sequence of SEQ ID NO:X (e.g., the polypeptide of SEQ ID NO:Y and the polypeptide encoded by the portion of SEQ ID NO:X as defined in columns 8 and 9 of Table 2) or the cDNA contained in Clone ID NO:Z may be analyzed using the default parameters of the DNASTAR computer algorithm (DNASTAR, Inc., 1228 S. Park St., Madison, Wis. 53715 USA; http://www.dnastar.com/).

[0165] Polypeptide regions that may be routinely obtained using the DNASTAR computer algorithm include, but are not limited to, Garnier-Robson alpha-regions, beta-regions, turn-regions, and coil-regions; Chou-Fasman alpha-regions, beta-regions, and turn-regions; Kyte-Doolittle hydrophilic regions and hydrophobic regions; Eisenberg alpha- and beta-amphipathic regions; Karplus-Schulz flexible regions; Emini surface-forming regions; and Jameson-Wolf regions of high antigenic index. Among highly preferred polynucleotides of the invention in this regard are those that encode polypeptides comprising regions that combine several structural features, such as several (e.g., 1, 2, 3 or 4) of the features set out above.

[0166] Additionally, Kyte-Doolittle hydrophilic regions and hydrophobic regions, Emini surface-forming regions, and Jameson-Wolf regions of high antigenic index (i.e., containing four or more contiguous amino acids having an antigenic index of greater than or equal to 1.5, as identified using the default parameters of the Jameson-Wolf program) can routinely be used to determine polypeptide regions that exhibit a high degree of potential for antigenicity. Regions of high antigenicity are determined from data by DNASTAR analysis by choosing values which represent regions of the polypeptide which are likely to be exposed on the surface of the polypeptide in an environment in which antigen recognition may occur in the process of initiation of an immune response.

[0167] Preferred polypeptide fragments of the invention are fragments comprising, or alternatively, consisting of, an amino acid sequence that displays a functional activity (e.g. biological activity) of the polypeptide sequence of which the amino acid sequence is a fragment. By a polypeptide displaying a “functional activity” is meant a polypeptide capable of one or more known functional activities associated with a full-length protein, such as, for example, biological activity, antigenicity, immunogenicity, and/or multimerization, as described herein.

[0168] Other preferred polypeptide fragments are biologically active fragments. Biologically active fragments are those exhibiting activity similar, but not necessarily identical, to an activity of the polypeptide of the present invention. The biological activity of the fragments may include an improved desired activity, or a decreased undesirable activity.

[0169] In preferred embodiments, polypeptides of the invention comprise, or alternatively consist of, one, two, three, four, five or more of the antigenic fragments of the polypeptide of SEQ ID NO:Y, or portions thereof. Polynucleotides encoding these polypeptides are also encompassed by the invention.

[0170] The present invention encompasses polypeptides comprising, or alternatively consisting of, an epitope of: the polypeptide sequence shown in SEQ ID NO:Y; a polypeptide sequence encoded by SEQ ID NO:X or the complementary strand thereto; the polypeptide sequence encoded by the portion of SEQ ID NO:X as defined in columns 8 and 9 of Table 2; the polypeptide sequence encoded by the portion of SEQ ID NO:B as defined in column 6 of Table 1B or the complement thereto; the polypeptide sequence encoded by the cDNA contained in Clone ID NO:Z; or the polypeptide sequence encoded by a polynucleotide that hybridizes to the sequence of SEQ ID NO:X, the complement of the sequence of SEQ ID NO:X, the complement of a portion of SEQ ID NO:X as defined in columns 8 and 9 of Table 2, or the cDNA sequence contained in Clone ID NO:Z under stringent hybridization conditions or alternatively, under lower stringency hybridization as defined supra. The present invention further encompasses polynucleotide sequences encoding an epitope of a polypeptide sequence of the invention (such as, for example, the sequence disclosed in SEQ ID NO:X, or a fragment thereof), polynucleotide sequences of the complementary strand of a polynucleotide sequence encoding an epitope of the invention, and polynucleotide sequences which hybridize to the complementary strand under stringent hybridization conditions or alternatively, under lower stringency hybridization conditions defined supra.

[0171] The term “epitopes,” as used herein, refers to portions of a polypeptide having antigenic or immunogenic activity in an animal, preferably a mammal, and most preferably in a human. In a preferred embodiment, the present invention encompasses a polypeptide comprising an epitope, as well as the polynucleotide encoding this polypeptide. An “immunogenic epitope,” as used herein, is defined as a portion of a protein that elicits an antibody response in an animal, as determined by any method known in the art, for example, by the methods for generating antibodies described infra. (See, for example, Geysen et al., Proc. Natl. Acad. Sci. USA 81:3998-4002 (1983)). The term “antigenic epitope,” as used herein, is defined as a portion of a protein to which an antibody can immunospecifically bind its antigen as determined by any method well known in the art, for example, by the immunoassays described herein. Immunospecific binding excludes non-specific binding but does not necessarily exclude cross-reactivity with other antigens. Antigenic epitopes need not necessarily be immunogenic.

[0172] Fragments which function as epitopes may be produced by any conventional means. (See, e.g., Houghten, R. A., Proc. Natl. Acad. Sci. USA 82:5131-5135 (1985) further described in U.S. Pat. No. 4,631,211.)

[0173] In the present invention, antigenic epitopes preferably contain a sequence of at least 4, at least 5, at least 6, at least 7, more preferably at least 8, at least 9, at least 10, at least 11, at least 12, at least 13, at least 14, at least 15, at least 20, at least 25, at least 30, at least 40, at least 50, and, most preferably, between about 15 to about 30 amino acids. Preferred polypeptides comprising immunogenic or antigenic epitopes are at least 10, 15, 20, 25, 30, 35, 40, 45, 50, 55, 60, 65, 70, 75, 80, 85, 90, 95, or 100 amino acid residues in length. Additional non-exclusive preferred antigenic epitopes include the antigenic epitopes disclosed herein, as well as portions thereof. Antigenic epitopes are useful, for example, to raise antibodies, including monoclonal antibodies, that specifically bind the epitope. Preferred antigenic epitopes include the antigenic epitopes disclosed herein, as well as any combination of two, three, four, five or more of these antigenic epitopes. Antigenic epitopes can be used as the target molecules in immunoassays. (See, for instance, Wilson et al., Cell 37:767-778 (1984); Sutcliffe et al., Science 219:660-666 (1983)).

[0174] Non-limiting examples of epitopes of polypeptides that can be used to generate antibodies of the invention include a polypeptide comprising, or alternatively consisting of, at least one, two, three, four, five, six or more of the portion(s) of SEQ ID NO:Y specified in column 6 of Table 1A. These polypeptide fragments have been determined to bear antigenic epitopes of the proteins of the invention by the analysis of the Jameson-Wolf antigenic index which is included in the DNAStar suite of computer programs. By “comprise” it is intended that a polypeptide contains at least one, two, three, four, five, six or more of the portion(s) of SEQ ID NO:Y shown in column 6 of Table 1A, but it may contain additional flanking residues on either the amino or carboxyl termini of the recited portion. Such additional flanking sequences are preferably sequences naturally found adjacent to the portion; i.e., contiguous sequence shown in SEQ ID NO:Y. The flanking sequence may, however, be sequences from a heterologous polypeptide, such as from another protein described herein or from a heterologous polypeptide not described herein. In particular embodiments, epitope portions of a polypeptide of the invention comprise one, two, three, or more of the portions of SEQ ID NO:Y shown in column 6 of Table 1A. Polynucleotides encoding these polypeptides are also encompassed by the invention.

[0175] Similarly, immunogenic epitopes can be used, for example, to induce antibodies according to methods well known in the art. See, for instance, Sutcliffe et al., supra; Wilson et al., supra; Chow et al., Proc. Natl. Acad. Sci. USA 82:910-914; and Bittle et al., J. Gen. Virol. 66:2347-2354 (1985). Preferred immunogenic epitopes include the immunogenic epitopes disclosed herein, as well as any combination of two, three, four, five or more of these immunogenic epitopes. The polypeptides comprising one or more immunogenic epitopes may be presented for eliciting an antibody response together with a carrier protein, such as an albumin, to an animal system (such as rabbit or mouse), or, if the polypeptide is of sufficient length (at least about 25 amino acids), the polypeptide may be presented without a carrier. However, immunogenic epitopes comprising as few as 8 to 10 amino acids have been shown to be sufficient to raise antibodies capable of binding to, at the very least, linear epitopes in a denatured polypeptide (e.g., in Western blotting).

[0176] Epitope-bearing polypeptides of the present invention may be used to induce antibodies according to methods well known in the art including, but not limited to, in vivo immunization, in vitro immunization, and phage display methods. See, e.g., Sutcliffe et al., supra; Wilson et al., supra, and Bittle et al., J. Gen. Virol., 66:2347-2354 (1985). If in vivo immunization is used, animals may be immunized with free peptide; however, anti-peptide antibody titer may be boosted by coupling the peptide to a macromolecular carrier, such as keyhole limpet hemacyanin (KLH) or tetanus toxoid. For instance, peptides containing cysteine residues may be coupled to a carrier using a linker such as maleimidobenzoyl-N-hydroxysuccinimide ester (MBS), while other peptides may be coupled to carriers using a more general linking agent such as glutaraldehyde. Animals such as rabbits, rats and mice are immunized with either free or carrier-coupled peptides, for instance, by intraperitoneal and/or intradermal injection of emulsions containing about 100 μg of peptide or carrier protein and Freund's adjuvant or any other adjuvant known for stimulating an immune response. Several booster injections may be needed, for instance, at intervals of about two weeks, to provide a useful titer of anti-peptide antibody which can be detected, for example, by ELISA assay using free peptide adsorbed to a solid surface. The titer of anti-peptide antibodies in serum from an immunized animal may be increased by selection of anti-peptide antibodies, for instance, by adsorption to the peptide on a solid support and elution of the selected antibodies according to methods well known in the art.

[0177] As one of skill in the art will appreciate, and as discussed above, the polypeptides of the present invention (e.g., those comprising an immunogenic or antigenic epitope) can be fused to heterologous polypeptide sequences. For example, polypeptides of the present invention (including fragments or variants thereof), may be fused with the constant domain of immunoglobulins (IgA, IgE, IgG, IgM), or portions thereof (CH1, CH2, CH3, or any combination thereof and portions thereof), resulting in chimeric polypeptides. By way of another non-limiting example, polypeptides and/or antibodies of the present invention (including fragments or variants thereof) may be fused with albumin (including but not limited to recombinant human serum albumin or fragments or variants thereof (see, e.g., U.S. Pat. No. 5,876,969, issued Mar. 2, 1999, EP Patent 0 413 622, and U.S. Pat. No. 5,766,883, issued Jun. 16, 1998, herein incorporated by reference in their entirety)). In a preferred embodiment, polypeptides and/or antibodies of the present invention (including fragments or variants thereof are fused with the mature form of human serum albumin (i.e., amino acids 1-585 of human serum albumin as shown in FIGS. 1 and 2 of EP Patent 0 322 094) which is herein incorporated by reference in its entirety. In another preferred embodiment, polypeptides and/or antibodies of the present invention (including fragments or variants thereof) are fused with polypeptide fragments comprising, or alternatively consisting of, amino acid residues 1-z of human serum albumin, where z is an integer from 369 to 419, as described in U.S. Pat. No. 5,766,883 herein incorporated by reference in its entirety. Polypeptides and/or antibodies of the present invention (including fragments or variants thereof) may be fused to either the N- or C-terminal end of the heterologous protein (e.g., immunoglobulin Fc polypeptide or human serum albumin polypeptide). Polynucleotides encoding fusion proteins of the invention are also encompassed by the invention.

[0178] Such fusion proteins as those described above may facilitate purification and may increase half-life in vivo. This has been shown for chimeric proteins consisting of the first two domains of the human CD4-polypeptide and various domains of the constant regions of the heavy or light chains of mammalian immunoglobulins. See, e.g., EP 394,827; Traunecker et al., Nature, 331:84-86 (1988). Enhanced delivery of an antigen across the epithelial barrier to the immune system has been demonstrated for antigens (e.g., insulin) conjugated to an FcRn binding partner such as IgG or Fc fragments (see, e.g., PCT Publications WO 96/22024 and WO 99/04813). IgG Fusion proteins that have a disulfide-linked dimeric structure due to the IgG portion desulfide bonds have also been found to be more efficient in binding and neutralizing other molecules than monomeric polypeptides or fragments thereof alone. See, e.g., Fountoulakis et al., J. Biochem., 270:3958-3964 (1995). Nucleic acids encoding the above epitopes can also be recombined with a gene of interest as an epitope tag (e.g., the hemagglutinin (HA) tag or flag tag) to aid in detection and purification of the expressed polypeptide. For example, a system described by Janknecht et al. allows for the ready purification of non-denatured fusion proteins expressed in human cell lines (Janknecht et al., 1991, Proc. Natl. Acad. Sci. USA 88:8972-897). In this system, the gene of interest is subcloned into a vaccinia recombination plasmid such that the open reading frame of the gene is translationally fused to an amino-terminal tag consisting of six histidine residues. The tag serves as a matrix binding domain for the fusion protein. Extracts from cells infected with the recombinant vaccinia virus are loaded onto Ni2+ nitriloacetic acid-agarose column and histidine-tagged proteins can be selectively eluted with imidazole-containing buffers.

[0179] Fusion Proteins

[0180] Any polypeptide of the present invention can be used to generate fusion proteins. For example, the polypeptide of the present invention, when fused to a second protein, can be used as an antigenic tag. Antibodies raised against the polypeptide of the present invention can be used to indirectly detect the second protein by binding to the polypeptide. Moreover, because secreted proteins target cellular locations based on trafficking signals, polypeptides of the present invention which are shown to be secreted can be used as targeting molecules once fused to other proteins.

[0181] Examples of domains that can be fused to polypeptides of the present invention include not only heterologous signal sequences, but also other heterologous functional regions. The fusion does not necessarily need to be direct, but may occur through linker sequences.

[0182] In certain preferred embodiments, proteins of the invention are fusion proteins comprising an amino acid sequence that is an N and/or C-terminal deletion of a polypeptide of the invention. In preferred embodiments, the invention is directed to a fusion protein comprising an amino acid sequence that is at least 80%, 85%, 90%, 95%, 96%, 97%, 98% or 99% identical to a polypeptide sequence of the invention. Polynucleotides encoding these proteins are also encompassed by the invention.

[0183] Moreover, fusion proteins may also be engineered to improve characteristics of the polypeptide of the present invention. For instance, a region of additional amino acids, particularly charged amino acids, may be added to the N-terminus of the polypeptide to improve stability and persistence during purification from the host cell or subsequent handling and storage. Also, peptide moieties may be added to the polypeptide to facilitate purification. Such regions may be removed prior to final preparation of the polypeptide. The addition of peptide moieties to facilitate handling of polypeptides are familiar and routine techniques in the art.

[0184] As one of skill in the art will appreciate that, as discussed above, polypeptides of the present invention, and epitope-bearing fragments thereof, can be combined with heterologous polypeptide sequences. For example, the polypeptides of the present invention may be fused with heterologous polypeptide sequences, for example, the polypeptides of the present invention may be fused with the constant domain of immunoglobulins (IgA, IgE, IgG, IgM) or portions thereof (CH1, CH2, CH3, and any combination thereof, including both entire domains and portions thereof), or albumin (including, but not limited to, native or recombinant human albumin or fragments or variants thereof (see, e.g., U.S. Pat. No. 5,876,969, issued Mar. 2, 1999, EP Patent 0 413 622, and U.S. Pat. No. 5,766,883, issued Jun. 16, 1998, herein incorporated by reference in their entirety)), resulting in chimeric polypeptides. For example, EP-A-O 464 533 (Canadian counterpart 2045869) discloses fusion proteins comprising various portions of constant region of immunoglobulin molecules together with another human protein or part thereof. In many cases, the Fc part in a fusion protein is beneficial in therapy and diagnosis, and thus can result in, for example, improved pharmacokinetic properties (EP-A 0232 262). Alternatively, deleting the Fc part after the fusion protein has been expressed, detected, and purified, would be desired. For example, the Fc portion may hinder therapy and diagnosis if the fusion protein is used as an antigen for immunizations. In drug discovery, for example, human proteins, such as hIL-5, have been fused with Fc portions for the purpose of high-throughput screening assays to identify antagonists of hIL-5. See, D. Bennett et al., J. Molecular Recognition 8:52-58 (1995); K. Johanson et al., J. Biol. Chem. 270:9459-9471 (1995).

[0185] Moreover, the polypeptides of the present invention can be fused to marker sequences, such as a polypeptide which facilitates purification of the fused polypeptide. In preferred embodiments, the marker amino acid sequence is a hexa-histidine peptide, such as the tag provided in a pQE vector (QIAGEN, Inc., 9259 Eton Avenue, Chatsworth, Calif., 91311), among others, many of which are commercially available. As described in Gentz et al., Proc. Natl. Acad. Sci. USA 86:821-824 (1989), for instance, hexa-histidine provides for convenient purification of the fusion protein. Another peptide tag useful for purification, the “HA” tag, corresponds to an epitope derived from the influenza hemagglutinin protein (Wilson et al., Cell 37:767 (1984).)

[0186] Additional fusion proteins of the invention may be generated through the techniques of gene-shuffling, motif-shuffling, exon-shuffling, and/or codon-shuffling (collectively referred to as “DNA shuffling”), briefly described below, and further described herein. DNA shuffling may be employed to modulate the activities of polypeptides of the invention, such methods can be used to generate polypeptides with altered activity, as well as agonists and antagonists of the polypeptides. See, generally, U.S. Pat. Nos. 5,605,793; 5,811,238; 5,830,721; 5,834,252; and 5,837,458, and Patten et al., Curr. Opinion Biotechnol. 8:724-33 (1997); Harayama, Trends Biotechnol. 16(2):76-82 (1998); Hansson et al., J. Mol. Biol. 287:265-76 (1999); and Lorenzo and Blasco, Biotechniques 24(2):308-13 (1998); each of these patents and publications are hereby incorporated by reference in its entirety). In a preferred embodiment, one or more components, motifs, sections, parts, domains, fragments, etc., of a polynucleotide encoding a polypeptide of the invention may be recombined with one or more components, motifs, sections, parts, domains, fragments, etc., of one or more heterologous molecules encoding a heterologous polypeptide.

[0187] Thus, any of these above fusions can be engineered using the polynucleotides or the polypeptides of the present invention.

[0188] Recombinant and Synthetic Production of Polypeptides of the Invention

[0189] The present invention also relates to vectors containing the polynucleotide of the present invention, host cells, and the production of polypeptides by synthetic and recombinant techniques. The vector may be, for example, a phage, plasmid, viral, or retroviral vector. Retroviral vectors may be replication competent or replication defective. In the latter case, viral propagation generally will occur only in complementing host cells.

[0190] The polynucleotides of the invention may be joined to a vector containing a selectable marker for propagation in a host. Generally, a plasmid vector is introduced in a precipitate, such as a calcium phosphate precipitate, or in a complex with a charged lipid. If the vector is a virus, it may be packaged in vitro using an appropriate packaging cell line and then transduced into host cells.

[0191] The polynucleotide insert should be operatively linked to an appropriate promoter, such as the phage lambda PL promoter, the E. coli lac, trp, phoA and tac promoters, the SV40 early and late promoters and promoters of retroviral LTRs, to name a few. Other suitable promoters will be known to the skilled artisan. The expression constructs will further contain sites for transcription initiation, termination, and, in the transcribed region, a ribosome binding site for translation. The coding portion of the transcripts expressed by the constructs will preferably include a translation initiating codon at the beginning and a termination codon (UAA, UGA or UAG) appropriately positioned at the end of the polypeptide to be translated.

[0192] As indicated, the expression vectors will preferably include at least one selectable marker. Such markers include dihydrofolate reductase, G418 or neomycin resistance, glutamine synthase, for eukaryotic cell culture and tetracycline, kanamycin or ampicillin resistance genes for culturing in E. coli and other bacteria. Representative examples of appropriate hosts include, but are not limited to, bacterial cells, such as E. coli, Streptomyces and Salmonella typhimurium cells; fungal cells, such as yeast cells (e.g., Saccharomyces cerevisiae or Pichia pastoris (ATCC Accession No. 201178)); insect cells such as Drosophila S2 and Spodoptera Sf9 cells; animal cells such as CHO, COS, 293, NSO and Bowes melanoma cells; and plant cells. Appropriate culture mediums and conditions for the above-described host cells are known in the art.

[0193] Among vectors preferred for use in bacteria include pQE70, pQE60 and pQE-9, available from QIAGEN, Inc.; pBluescript vectors, Phagescript vectors, pNH8A, pNH16a, pNH18A, pNH46A, available from Stratagene Cloning Systems, Inc.; and ptrc99a, pKK223-3, pKK233-3, pDR540, pRIT5 available from Pharmacia Biotech, Inc. Among preferred eukaryotic vectors are pWLNEO, pSV2CAT, pOG44, pXT1 and pSG available from Stratagene; and pSVK3, pBPV, pMSG and pSVL available from Pharmacia. Preferred expression vectors for use in yeast systems include, but are not limited to pYES2, pYD1, pTEF1/Zeo, pYES2/GS, pPICZ, pGAPZ, pGAPZalph, pPIC9, pPIC3.5, pHIL-D2, pHIL-SI, pPIC3.5K, pPIC9K, and PAO815 (all available from Invitrogen, Carlsbad, Calif.). Other suitable vectors will be readily apparent to the skilled artisan.

[0194] Vectors which use glutamine synthase (GS) or DHFR as the selectable markers can be amplified in the presence of the drugs methionine sulphoximine or methotrexate, respectively. An advantage of glutamine synthase based vectors are the availabilty of cell lines (e.g., the murine myeloma cell line, NS0) which are glutamine synthase negative. Glutamine synthase expression systems can also function in glutamine synthase expressing cells (e.g., Chinese Hamster Ovary (CHO) cells) by providing additional inhibitor to prevent the functioning of the endogenous gene. A glutamine synthase expression system and components thereof are detailed in PCT publications: WO87/04462; WO86/05807; WO89/01036; WO89/10404; and WO91/06657 which are hereby incorporated in their entireties by reference herein. Additionally, glutamine synthase expression vectors can be obtained from Lonza Biologics, Inc. (Portsmouth, N.H.). Expression and production of monoclonal antibodies using a GS expression system in murine myeloma cells is described in Bebbington et al., Bio/technology 10:169(1992) and in Biblia and Robinson Biotechnol. Prog. 111:1 (1995) which are herein incorporated by reference.

[0195] The present invention also relates to host cells containing the above-described vector constructs described herein, and additionally encompasses host cells containing nucleotide sequences of the invention that are operably associated with one or more heterologous control regions (e.g., promoter and/or enhancer) using techniques known of in the art. The host cell can be a higher eukaryotic cell, such as a mammalian cell (e.g., a human derived cell), or a lower eukaryotic cell, such as a yeast cell, or the host cell can be a prokaryotic cell, such as a bacterial cell. A host strain may be chosen which modulates the expression of the inserted gene sequences, or modifies and processes the gene product in the specific fashion desired. Expression from certain promoters can be elevated in the presence of certain inducers; thus expression of the genetically engineered polypeptide may be controlled. Furthermore, different host cells have characteristics and specific mechanisms for the translational and post-translational processing and modification (e.g., phosphorylation, cleavage) of proteins. Appropriate cell lines can be chosen to ensure the desired modifications and processing of the foreign protein expressed.

[0196] Introduction of the nucleic acids and nucleic acid constructs of the invention into the host cell can be effected by calcium phosphate transfection, DEAE-dextran mediated transfection, cationic lipid-mediated transfection, electroporation, transduction, infection, or other methods. Such methods are described in many standard laboratory manuals, such as Davis et al., Basic Methods In Molecular Biology (1986). It is specifically contemplated that the polypeptides of the present invention may in fact be expressed by a host cell lacking a recombinant vector.

[0197] In addition to encompassing host cells containing the vector constructs discussed herein, the invention also encompasses primary, secondary, and immortalized host cells of vertebrate origin, particularly mammalian origin, that have been engineered to delete or replace endogenous genetic material (e.g., an endocrine antigen coding sequence), and/or to include genetic material (e.g., heterologous polynucleotide sequences) that is operably associated with an endocrine associated polynucleotide of the invention, and which activates, alters, and/or amplifies an endogenous endocrine associated polynucleotide. For example, techniques known in the art may be used to operably associate heterologous control regions (e.g., promoter and/or enhancer) and endogenous endocrine associated polynucleotide sequences via homologous recombination (see, e.g., U.S. Pat. No. 5,641,670, issued Jun. 24, 1997; International Publication Number WO 96/29411; International Publication Number WO 94/12650; Koller et al., Proc. Natl. Acad. Sci. USA 86:8932-8935 (1989); and Zijlstra et al., Nature 342:435-438 (1989), the disclosures of each of which are incorporated by reference in their entireties).

[0198] Polypeptides of the present invention can also be recovered from: products purified from natural sources, including bodily fluids, tissues and cells, whether directly isolated or cultured; products of chemical synthetic procedures; and products produced by recombinant techniques from a prokaryotic or eukaryotic host, including, for example, bacterial, yeast, higher plant, insect, and mammalian cells. Depending upon the host employed in a recombinant production procedure, the polypeptides of the present invention may be glycosylated or may be non-glycosylated. In addition, polypeptides of the invention may also include an initial modified methionine residue, in some cases as a result of host-mediated processes. Thus, it is well known in the art that the N-terminal methionine encoded by the translation initiation codon generally is removed with high efficiency from any protein after translation in all eukaryotic cells. While the N-terminal methionine on most proteins also is efficiently removed in most prokaryotes, for some proteins, this prokaryotic removal process is inefficient, depending on the nature of the amino acid to which the N-terminal methionine is covalently linked.

[0199] In one embodiment, the yeast Pichia pastoris is used to express polypeptides of the invention in a eukaryotic system. Pichia pastoris is a methylotrophic yeast which can metabolize methanol as its sole carbon source. A main step in the methanol metabolization pathway is the oxidation of methanol to formaldehyde using O₂. This reaction is catalyzed by the enzyme alcohol oxidase. In order to metabolize methanol as its sole carbon source, Pichia pastoris must generate high levels of alcohol oxidase due, in part, to the relatively low affinity of alcohol oxidase for O₂. Consequently, in a growth medium depending on methanol as a main carbon source, the promoter region of one of the two alcohol oxidase genes (AOX1) is highly active. In the presence of methanol, alcohol oxidase produced from the AOX1 gene comprises up to approximately 30% of the total soluble protein in Pichia pastoris. See, Ellis, S. B., et al., Mol. Cell. Biol. 5:1111-21 (1985); Koutz, P. J, et al., Yeast 5:167-77 (1989); Tschopp, J. F., et al., Nucl. Acids Res. 15:3859-76 (1987). Thus, a heterologous coding sequence, such as, for example, a polynucleotide of the present invention, under the transcriptional regulation of all or part of the AOX1 regulatory sequence is expressed at exceptionally high levels in Pichia yeast grown in the presence of methanol.

[0200] In one example, the plasmid vector pPIC9K is used to express DNA encoding a polypeptide of the invention, as set forth herein, in a Pichea yeast system essentially as described in “Pichia Protocols: Methods in Molecular Biology,” D. R. Higgins and J. Cregg, eds. The Humana Press, Totowa, N.J., 1998. This expression vector allows expression and secretion of a polypeptide of the invention by virtue of the strong AOX1 promoter linked to the Pichia pastoris alkaline phosphatase (PHO) secretory signal peptide (i.e., leader) located upstream of a multiple cloning site.

[0201] Many other yeast vectors could be used in place of pPIC9K, such as, pYES2, pYD1, pTEF1/Zeo, pYES2/GS, pPICZ, pGAPZ, pGAPZalpha, pPIC9, pPIC3.5, pHIL-D2, pHIL-S 1, pPIC3.5K, and PAO815, as one skilled in the art would readily appreciate, as long as the proposed expression construct provides appropriately located signals for transcription, translation, secretion (if desired), and the like, including an in-frame AUG as required.

[0202] In another embodiment, high-level expression of a heterologous coding sequence, such as, for example, a polynucleotide of the present invention, may be achieved by cloning the heterologous polynucleotide of the invention into an expression vector such as, for example, pGAPZ or pGAPZalpha, and growing the yeast culture in the absence of methanol.

[0203] In addition to encompassing host cells containing the vector constructs discussed herein, the invention also encompasses primary, secondary, and immortalized host cells of vertebrate origin, particularly mammalian origin, that have been engineered to delete or replace endogenous genetic material (e.g., coding sequence), and/or to include genetic material (e.g., heterologous polynucleotide sequences) that is operably associated with polynucleotides of the invention, and which activates, alters, and/or amplifies endogenous polynucleotides. For example, techniques known in the art may be used to operably associate heterologous control regions (e.g., promoter and/or enhancer) and endogenous polynucleotide sequences via homologous recombination (see, e.g., U.S. Pat. No. 5,641,670, issued Jun. 24, 1997; International Publication No. WO 96/29411, published Sep. 26, 1996; International Publication No. WO 94/12650, published Aug. 4, 1994; Koller et al., Proc. Natl. Acad. Sci. USA 86:8932-8935 (1989); and Zijlstra et al., Nature 342:435-438 (1989), the disclosures of each of which are incorporated by reference in their entireties).

[0204] In addition, polypeptides of the invention can be chemically synthesized using techniques known in the art (e.g., see Creighton, 1983, Proteins: Structures and. Molecular Principles, W. H. Freeman & Co., N.Y., and Hunkapiller et al., iVature, 310:105-111 (1984)). For example, a polypeptide corresponding to a fragment of a polypeptide can be synthesized by use of a peptide synthesizer. Furthermore, if desired, nonclassical amino acids or chemical amino acid analogs can be introduced as a substitution or addition into the polypeptide sequence. Non-classical amino acids include, but are not limited to, to the D-isomers of the common amino acids, 2,4-diaminobutyric acid, a-amino isobutyric acid, 4-aminobutyric acid, Abu, 2-amino butyric acid, g-Abu, e-Ahx, 6-amino hexanoic acid, Aib, 2-amino isobutyric acid, 3-amino propionic acid, ornithine, norleucine, norvaline, hydroxyproline, sarcosine, citrulline, homocitrulline, cysteic acid, t-butylglycine, t-butylalanine, phenylglycine, cyclohexylalanine, b-alanine, fluoro-amino acids, designer amino acids such as b-methyl amino acids, Ca-methyl amino acids, Na-methyl amino acids, and amino acid analogs in general. Furthermore, the amino acid can be D (dextrorotary) or L (levorotary).

[0205] The invention encompasses polypeptides of the present invention which are differentially modified during or after translation, e.g., by glycosylation, acetylation, phosphorylation, amidation, derivatization by known protecting/blocking groups, proteolytic cleavage, linkage to an antibody molecule or other cellular ligand, etc. Any of numerous chemical modifications may be carried out by known techniques, including but not limited, to specific chemical cleavage by cyanogen bromide, trypsin, chymotrypsin, papain, V8 protease, NaBH₄; acetylation, formylation, oxidation, reduction; metabolic synthesis in the presence of tunicamycin; etc.

[0206] Additional post-translational modifications encompassed by the invention include, for example, e.g., N-linked or O-linked carbohydrate chains, processing of N-terminal or C-terminal ends), attachment of chemical moieties to the amino acid backbone, chemical modifications of N-linked or O-linked carbohydrate chains, and addition or deletion of an N-terminal methionine residue as a result of procaryotic host cell expression. The polypeptides may also be modified with a detectable label, such as an enzymatic, fluorescent, isotopic or affinity label to allow for detection and isolation of the protein.

[0207] Examples of suitable enzymes include horseradish peroxidase, alkaline phosphatase, beta-galactosidase, or acetylcholinesterase; examples of suitable prosthetic group complexes include streptavidin/biotin and avidin/biotin; examples of suitable fluorescent materials include umbelliferone, fluorescein, fluorescein isothiocyanate, rhodamine, dichlorotriazinylamine fluorescein, dansyl chloride or phycoerythrin; an example of a luminescent material includes luminol; examples of bioluminescent materials include luciferase, luciferin, and aequorin; and examples of suitable radioactive material include iodine (¹²¹I, ¹²³I, ¹²⁵I, ¹³¹I), carbon (¹⁴C), sulfur (³⁵S), tritium (³H), indium (¹¹¹In, ¹¹²In, 113mIn, 115mIn), technetium (⁹⁹Tc,^{99m}Tc), thallium (²⁰¹Ti), gallium (⁶⁸Ga, ⁶⁷Ga), palladium (¹⁰³Pd), molybdenum (⁹⁹Mo), xenon (¹³³Xe), fluorine (⁸F), ¹⁵³Sm, ¹⁷⁷Lu, ¹⁵⁹Gd, ¹⁴⁹Pm, ¹⁴⁰La, ¹⁷⁵Yb, ¹⁶⁶Ho, ⁹⁰Y, ⁴⁷Sc, ¹⁸⁶Re, ¹⁸⁸ Re, ¹⁴²Pr, ¹⁰⁵Rh, and ⁹⁷Ru.

[0208] In specific embodiments, a polypeptide of the present invention or fragment or variant thereof is attached to macrocyclic chelators that associate with radiometal ions, including but not limited to, ¹⁷⁷Lu, ⁹⁰Y, ¹⁶⁶Ho, and ¹⁵³Sm, to polypeptides. In a preferred embodiment, the radiometal ion associated with the macrocyclic chelators is ¹¹¹In. In another preferred embodiment, the radiometat ion associated with the macrocyclic chelator is ⁹⁰Y. In specific embodiments, the macrocyclic chelator is 1,4,7,10-tetraazacyclododecane-N,N′,N″,N′″-tetraacetic acid (DOTA). In other specific embodiments, DOTA is attached to an antibody of the invention or fragment thereof via a linker molecule. Examples of linker molecules useful for conjugating DOTA to a polypeptide are commonly known in the art—see, for example, DeNardo et al., Clin Cancer Res. 4(10):2483-90 (1998); Peterson et al., Bioconjug. Chem. 10(4):553-7 (1999); and Zimmerman et al, Nuct. Med. Biol. 26(8):943-50 (1999); which are hereby incorporated by reference in their entirety.

[0209] As mentioned, the endocrine associated proteins of the invention may be modified by either natural processes, such as posttranslational processing, or by chemical modification techniques which are well known in the art. It will be appreciated that the same type of modification may be present in the same or varying degrees at several sites in a given endocrine associated polypeptide. Endocrine associated polypeptides may be branched, for example, as a result of ubiquitination, and they may be cyclic, with or without branching. Cyclic, branched, and branched cyclic endocrine associated polypeptides may result from posttranslation natural processes or may be made by synthetic methods. Modifications include acetylation, acylation, ADP-ribosylation, amidation, covalent attachment of flavin, covalent attachment of a heme moiety, covalent attachment of a nucleotide or nucleotide derivative, covalent attachment of a lipid or lipid derivative, covalent attachment of phosphotidylinositol, cross-linking, cyclization, disulfide bond formation, demethylation, formation of covalent cross-links, formation of cysteine, formation of pyroglutamate, formylation, gamma-carboxylation, glycosylation, GPI anchor formation, hydroxylation, iodination, methylation, myristoylation, oxidation, pegylation, proteolytic processing, phosphorylation, prenylation, racemization, selenoylation, sulfation, transfer-RNA mediated addition of amino acids to proteins such as arginylation, and ubiquitination. (See, for instance, PROTEINS—STRUCTURE AND MOLECULAR PROPERTIES, 2nd Ed., T. E. Creighton, W. H. Freeman and Company, New York (1993); POSTTRANSLATIONAL COVALENT MODIFICATION OF PROTEINS, B. C. Johnson, Ed., Academic Press, New York, pgs. 1-12 (1983); Seifter et al., Meth. Enzymol. 182:626-646 (1990); Rattan et al., Ann. N.Y. Acad. Sci. 663:48-62 (1992)).

[0210] Also provided by the invention are chemically modified derivatives of the polypeptides of the invention which may provide additional advantages such as increased solubility, stability and circulating time of the polypeptide, or decreased immunogenicity (see U.S. Pat. No. 4,179,337). The chemical moieties for derivitization may be selected from water soluble polymers such as polyethylene glycol, ethylene glycol/propylene glycol copolymers, carboxymethylcellulose, dextran, polyvinyl alcohol and the like. The polypeptides may be modified at random positions within the molecule, or at predetermined positions within the molecule and may include one, two, three or more attached chemical moieties.

[0211] The polymer may be of any molecular weight, and may be branched or unbranched. For polyethylene glycol, the preferred molecular weight is between about 1 kDa and about 100 kDa (the term “about” indicating that in preparations of polyethylene glycol, some molecules will weigh more, some less, than the stated molecular weight) for ease in handling and manufacturing. Other sizes may be used, depending on the desired therapeutic profile (e.g., the duration of sustained release desired, the effects, if any on biological activity, the ease in handling, the degree or lack of antigenicity and other known effects of the polyethylene glycol to a therapeutic protein or analog). For example, the polyethylene glycol may have an average molecular weight of about 200, 500, 1000, 1500, 2000, 2500, 3000, 3500, 4000, 4500, 5000, 5500, 6000, 6500, 7000, 7500, 8000, 8500, 9000, 9500, 10,000, 10,500, 11,000, 11,500, 12,000, 12,500, 13,000, 13,500, 14,000, 14,500, 15,000, 15,500, 16,000, 16,500, 17,000, 17,500, 18,000, 18,500, 19,000, 19,500, 20,000, 25,000, 30,000, 35,000, 40,000, 50,000, 55,000, 60,000, 65,000, 70,000, 75,000, 80,000, 85,000, 90,000, 95,000, or 100,000 kDa.

[0212] As noted above, the polyethylene glycol may have a branched structure. Branched polyethylene glycols are described, for example, in U.S. Pat. No. 5,643,575; Morpurgo et al., Appl. Biochem. Biotechnol. 56:59-72 (1996); Vorobjev et al., Nucteosides Nucleotides 18:2745-2750 (1999); and Caliceti et al., Bioconjug. Chem. 10:638-646 (1999), the disclosures of each of which are incorporated herein by reference.

[0213] The polyethylene glycol molecules (or other chemical moieties) should be attached to the protein with consideration of effects on functional or antigenic domains of the protein. There are a number of attachment methods available to those skilled in the art, such as, for example, the method disclosed in EP 0 401 384 (coupling PEG to G-CSF), herein incorporated by reference; see also Malik et al., Exp. Hematol. 20:1028-1035 (1992), reporting pegylation of GM-CSF using tresyl chloride. For example, polyethylene glycol may be covalently bound through amino acid residues via a reactive group, such as a free amino or carboxyl group. Reactive groups are those to which an activated polyethylene glycol molecule may be bound. The amino acid residues having a free amino group may include lysine residues and the N-terminal amino acid residues; those having a free carboxyl group may include aspartic acid residues glutamic acid residues and the C-terminal amino acid residue. Sulfhydryl groups may also be used as a reactive group for attaching the polyethylene glycol molecules. Preferred for therapeutic purposes is attachment at an amino group, such as attachment at the N-terminus or lysine group.

[0214] As suggested above, polyethylene glycol may be attached to proteins via linkage to any of a number of amino acid residues. For example, polyethylene glycol can be linked to proteins via covalent bonds to lysine, histidine, aspartic acid, glutamic acid, or cysteine residues. One or more reaction chemistries may be employed to attach polyethylene glycol to specific amino acid residues (e.g., lysine, histidine, aspartic acid, glutamic acid, or cysteine) of the protein or to more than one type of amino acid residue (e.g., lysine, histidine, aspartic acid, glutamic acid, cysteine and combinations thereof) of the protein.

[0215] One may specifically desire proteins chemically modified at the N-terminus. Using polyethylene glycol as an illustration of the present composition, one may select from a variety of polyethylene glycol molecules (by molecular weight, branching, etc.), the proportion of polyethylene glycol molecules to protein (polypeptide) molecules in the reaction mix, the type of pegylation reaction to be performed, and the method of obtaining the selected N-terminally pegylated protein. The method of obtaining the N-terminally pegylated preparation (i.e., separating this moiety from other monopegylated moieties if necessary) may be by purification of the N-terminally pegylated material from a population of pegylated protein molecules. Selective proteins chemically modified at the N-terminus modification may be accomplished by reductive alkylation which exploits differential reactivity of different-types of primary amino groups (lysine versus the N-terminal) available for derivatization in a particular protein. Under the appropriate reaction conditions, substantially selective derivatization of the protein at the N-terminus with a carbonyl group containing polymer is achieved.

[0216] As indicated above, pegylation of the proteins of the invention may be accomplished by any number of means: For example, polyethylene glycol may be attached to the protein either directly or by an intervening linker. Linkerless systems for attaching polyethylene glycol to proteins are described in Delgado et al., Crit. Rev. Thera. Drug Carrier Sys. 9:249-304 (1992); Francis et al., Intern. J. of Hematol. 68:1-18 (1998); U.S. Pat. No. 4,002,531; U.S. Pat. No. 5,349,052; WO 95/06058; and WO 98/32466, the disclosures of each of which are incorporated herein by reference.

[0217] One system for attaching polyethylene glycol directly to amino acid residues of proteins without an intervening linker employs tresylated MPEG, which is produced by the modification of monmethoxy polyethylene glycol (MPEG) using tresylchloride (ClSO₂CH₂CF₃). Upon reaction of protein with tresylated MPEG, polyethylene glycol is directly attached to amine groups of the protein. Thus, the invention includes protein-polyethylene glycol conjugates produced by reacting proteins of the invention with a polyethylene glycol molecule having a 2,2,2-trifluoreothane sulphonyl group.

[0218] Polyethylene glycol can also be attached to proteins using a number of different intervening linkers. For example, U.S. Pat. No. 5,612,460, the entire disclosure of which is incorporated herein by reference, discloses urethane linkers for connecting polyethylene glycol to proteins. Protein-polyethylene glycol conjugates wherein the polyethylene glycol is attached to the protein by a linker can also be produced by reaction of proteins with compounds such as MPEG-succinimidylsuccinate, MPEG activated with 1,1′-carbonyldiimidazole, MPEG-2,4,5-trichloropenylcarbonate, MPEG-p-nitrophenolcarbonate, and various MPEG-succinate derivatives. A number of additional polyethylene glycol derivatives and reaction chemistries for attaching polyethylene glycol to proteins are described in International Publication No. WO 98/32466, the entire disclosure of which is incorporated herein by reference. Pegylated protein products produced using the reaction chemistries set out herein are included within the scope of the invention.

[0219] The number of polyethylene glycol moieties attached to each protein of the invention (i.e., the degree of substitution) may also vary. For example, the pegylated proteins of the invention may be linked, on average, to 1, 2, 3, 4, 5, 6, 7, 8, 9, 10, 12, 15, 17, 20, or more polyethylene glycol molecules. Similarly, the average degree of substitution within ranges such as 1-3,2-4, 3-5,4-6, 5-7,6-8, 7-9,8-10, 9-11, 10-12, 11-13, 12-14, 13-15, 14-16, 15-17, 16-18, 17-19, or 18-20 polyethylene glycol moieties per protein molecule. Methods for determining the degree of substitution are discussed, for example, in Delgado et al., Crit. Rev. Thera. Drug Carrier Sys. 9:249-304 (1992).

[0220] The endocrine associated polypeptides of the invention can be recovered and purified from chemical synthesis and recombinant cell cultures by standard methods which include, but are not limited to, ammonium sulfate or ethanol precipitation, acid extraction, anion or cation exchange chromatography, phosphocellulose chromatography, hydrophobic interaction chromatography, affinity chromatography, hydroxylapatite chromatography and lectin chromatography. Most preferably, high performance liquid chromatography (“HPLC”) is employed for purification. Well known techniques for refolding protein may be employed to regenerate active conformation when the polypeptide is denatured during isolation and/or purification.

[0221] Endocrine associated polynucleotides and polypeptides may be used in accordance with the present invention for a variety of applications, particularly those that make use of the chemical and biological properties of endocrine associated antigens. Among these are applications in the detection, diagnosis, prevention, and/or treatment of diseases associated with the endocrine system, such as e.g., cancers of endocrine tissues, tumors, Addison's disease, Cushing's syndrome, Thyrotoxicosis, Graves' disease, gigantism, pheochromocytoma, neuroblastoma, Berardinelli-Seip Congenital Lipodystrophy, Carney complex, Schmidt syndrome, precocious puberty, Borj eson-Forssman-Lehmann syndrome, Von Hippel-Lindau syndrome, Johanson-Blizzard syndrome, multiple endocrine neoplasia autoimmune polyendocrinopathy syndrome, Beckwith-Wiedemann syndrome, hyponatremia, cyclical mastalgia, invasive thymoma, toxic multinodular goitre, androgen-insensitivity syndrome, sertoli cell tumors, sex cord-stromal tumors, thyrotropin deficiency, Pendred syndrome, Thyrocerebroretinal syndrome, macrosomia adiposa congenita, adrenomyodystrophy, chromogranin, Retinohepatoendocrinologic syndrome, aniridia, adrenoleukodystrophy, Werner syndrome, Patterson pseudoleprechaunism syndrome, Rhyns syndrome, Bardet-Biedl syndrome, Reifenstein syndrome, chronic adrenocortical insufficiency and disorders and/or cancers of endocrine tissues, including but not limited to, pancreas (e.g., congenital pancreatic agenesis, diabetes mellitus, diabetes insipidis, pheochromocytoma—islet cell tumor syndrome, nesidioblastosis of pancreas, islet cell adenomatosis); adrenal cortex (e.g., adrenoleukodystrophy, adrenal hypoplasia, adrenocortical carcinoma); ovary (e.g., ovarian cancer, polycystic ovary syndrome); pituitary (e.g., hyper-, hypopituitarism, pituitary dwarfism, pituitary adenoma, panhypopituitarism, thyrotropin deficiency, pituitary cretinism, McCune-Albright syndrome, acromegaly, Albright hereditary osteodystrophy, Kallmann syndrome); thyroid (e.g., hyper-, hypothyroidism, thyroid hormone coupling defect, thymic aplasia, human thyroid carcinoma, Hurthle cell tumours of the thyroid, thyroid carcinoma, medullary thyroid carcinoma, myxedema and cretinism, congenital hypothyroidism); parathyroid (e.g., hyper-, hypoparathyroidism, hyperparathyroidism); hypothallamus; and testes (e.g., capillary haemangioma of the testis (benign), neoplasias of the testis and neo-testis, testicular regression syndrome) and/or as described under “Endocrine Disorders,” “Reproductive Disorders” and/or “Gastrointestinal Disorders” below. Additional applications relate to diagnosis and to treatment of disorders of cells, tissues and organisms. These aspects of the invention are discussed further below.

[0222] In a preferred embodiment, polynucleotides associated with a tissue/cell type as disclosed in Table 1A, column 7 are used to detect, diagnose, treat, prevent and/or prognose disorders of a normal or diseased tissue/cell source corresponding to column 7 of Table 7.

[0223] The polypeptides of the invention may be in monomers or multimers (i.e., dimers, trimers, tetramers an d higher multimers). Accordingly, the present invention relates to monomers and multimers of the polypeptides of the invention, their preparation, and compositions (preferably, Therapeutics) containing them. In specific embodiments, the polypeptides of the invention are monomers, dimers, trimers or tetramers. In additional embodiments, the multimers of the invention are at least dimers, at least trimers, or at least tetramers.

[0224] Multimers encompassed by the invention may be homomers or heteromers. As used herein, the term homomer refers to a multimer containing only polypeptides corresponding to a protein of the invention (e.g., the amino acid sequence of SEQ ID NO:Y, an amino acid sequence encoded by SEQ ID NO:X or the complement of SEQ ID NO:X, the amino acid sequence encoded by the portion of SEQ ID NO:X as defined in columns 8 and 9 of Table 2, and/or an amino acid sequence encoded by cDNA contained in Clone ID NO:Z (including fragments, variants, splice variants, and fusion proteins, corresponding to these as described herein)). These homomers may contain polypeptides having identical or different amino acid sequences. In a specific embodiment, a homomer of the invention is a multimer containing only polypeptides having an identical amino acid sequence. In another specific embodiment, a homomer of the invention is a multimer containing polypeptides having different amino acid sequences. In specific embodiments, the multimer of the invention is a homodimer (e.g., containing two polypeptides having identical or different amino acid sequences) or a homotrimer (e.g., containing three polypeptides having identical and/or different amino acid sequences). In additional embodiments, the homomeric multimer of the invention is at least a homodimer, at least a homotrimer, or at least a homotetramer.

[0225] As used herein, the term heteromer refers to a multimer containing two or more heterologous polypeptides (i.e., polypeptides of different proteins) in addition to the polypeptides of the invention. In a specific embodiment, the multimer of the invention is a heterodimer, a heterotrimer, or a heterotetramer. In additional embodiments, the heteromeric multimer of the invention is at least a heterodimer, at least a heterotrimer, or at least a heterotetramer.

[0226] Multimers of the invention may be the result of hydrophobic, hydrophilic, ionic and/or covalent associations and/or may be indirectly linked by, for example, liposome formation. Thus, in one embodiment, multimers of the invention, such as, for example, homodimers or homotrimers, are formed when polypeptides of the invention contact one another in solution. In another embodiment, heteromultimers of the invention, such as, for example, heterotrimers or heterotetramers, are formed when polypeptides of the invention contact antibodies to the polypeptides of the invention (including antibodies to the heterologous polypeptide sequence in a fusion protein of the invention) in solution. In other embodiments, multimers of the invention are formed by covalent associations with and/or between the polypeptides of the invention. Such covalent associations may involve one or more amino acid residues contained in the polypeptide sequence (e.g., that recited in SEQ ID NO:Y, encoded by the portion of SEQ ID NO:X as defined in columns 8 and 9 of Table 2, and/or encoded by the cDNA contained in Clone ID NO:Z). In one instance, the covalent associations are cross-linking between cysteine residues located within the polypeptide sequences which interact in the native (i.e., naturally occurring) polypeptide. In another instance, the covalent associations are the consequence of chemical or recombinant manipulation. Alternatively, such covalent associations may involve one or more amino acid residues contained in the heterologous polypeptide sequence in a fusion protein. In one example, covalent associations are between the heterologous sequence contained in a fusion protein of the invention (see, e.g., U.S. Pat. No. 5,478,925). In a specific example, the covalent associations are between the heterologous sequence contained in a Fc fusion protein of the invention (as described herein). In another specific example, covalent associations of fusion proteins of the invention are between heterologous polypeptide sequence from another protein that is capable of forming covalently associated multimers, such as for example, osteoprotegerin (see, e.g., International Publication NO: WO 98/49305, the contents of which are herein incorporated by reference in its entirety). In another embodiment, two or more polypeptides of the invention are joined through peptide linkers. Examples include those peptide linkers described in U.S. Pat. No. 5,073,627 (hereby incorporated by reference). Proteins comprising multiple polypeptides of the invention separated by peptide linkers may be produced using conventional recombinant DNA technology.

[0227] Another method for preparing multimer polypeptides of the invention involves use of polypeptides of the invention fused to a leucine zipper or isoleucine zipper polypeptide sequence. Leucine zipper and isoleucine zipper domains are polypeptides that promote multimerization of the proteins in which they are found. Leucine zippers were originally identified in several DNA-binding proteins (Landschulz et al., Science 240:1759, (1988)), and have since been found in a variety of different proteins. Among the known leucine zippers are naturally occurring peptides and derivatives thereof that dimerize or trimerize. Examples of leucine zipper domains suitable for producing soluble multimeric proteins of the invention are those described in PCT application WO 94/10308, hereby incorporated by reference. Recombinant fusion proteins comprising a polypeptide of the invention fused to a polypeptide sequence that dimerizes or trimerizes in solution are expressed in suitable host cells, and the resulting soluble multimeric fusion protein is recovered from the culture supernatant using techniques known in the art.

[0228] Trimeric polypeptides of the invention may offer the advantage of enhanced biological activity. Preferred leucine zipper moieties and isoleucine moieties are those that preferentially form trimers. One example is a leucine zipper derived from lung surfactant protein D (SPD), as described in Hoppe et al. (FEBS Letters 344:191, (1994)) and in U.S. patent application Ser. No. 08/446,922, hereby incorporated by reference. Other peptides derived from naturally occurring trimeric proteins may be employed in preparing trimeric polypeptides of the invention.

[0229] In another example, proteins of the invention are associated by interactions between Flag® polypeptide sequence contained in fusion proteins of the invention containing Flag® polypeptide sequence. In a further embodiment, proteins of the invention are associated by interactions between heterologous polypeptide sequence contained in Flag® fusion proteins of the invention and anti-Flag® antibody.

[0230] The multimers of the invention may be generated using chemical techniques known in the art. For example, polypeptides desired to be contained in the multimers of the invention may be chemically cross-linked using linker molecules and linker molecule length optimization techniques known in the art (see, e.g., U.S. Pat. No. 5,478,925, which is herein incorporated by reference in its entirety). Additionally, multimers of the invention may be generated using techniques known in the art to form one or more inter-molecule cross-links between the cysteine residues located within the sequence of the polypeptides desired to be contained in the multimer (see, e.g., U.S. Pat. No. 5,478,925, which is herein incorporated by reference in its entirety). Further, polypeptides of the invention may be routinely modified by the addition of cysteine or biotin to the C-terminus or N-terminus of the polypeptide and techniques known in the art may be applied to generate multimers containing one or more of these modified polypeptides (see, e.g., U.S. Pat. No. 5,478,925, which is herein incorporated by reference in its entirety). Additionally, techniques known in the art may be applied to generate liposomes containing the polypeptide components desired to be contained in the multimer of the invention (see, e.g., U.S. Pat. No. 5,478,925, which is herein incorporated by reference in its entirety).

[0231] Alternatively, multimers of the invention may be generated using genetic engineering techniques known in the art. In one embodiment, polypeptides contained in multimers of the invention are produced recombinantly using fusion protein technology described herein or otherwise known in the art (see, e.g., U.S. Pat. No. 5,478,925, which is herein incorporated by reference in its entirety). In a specific embodiment, polynucleotides coding for a homodimer of the invention are generated by ligating a polynucleotide sequence encoding a polypeptide of the invention to a sequence encoding a linker polypeptide and then further to a synthetic polynucleotide encoding the translated product of the polypeptide in the reverse orientation from the original C-terminus to the N-terminus (lacking the leader sequence) (see, e.g., U.S. Pat. No. 5,478,925, which is herein incorporated by reference in its entirety). In another embodiment, recombinant techniques described herein or otherwise known in the art are applied to generate recombinant polypeptides of the invention which contain a transmembrane domain (or hydrophobic or signal peptide) and which can be incorporated by membrane reconstitution techniques into liposomes (see, e.g., U.S. Pat. No. 5,478,925, which is herein incorporated by reference in its entirety).

[0232] Antibodies

[0233] Further polypeptides of the invention relate to antibodies and T-cell antigen receptors (TCR) which immunospecifically bind a polypeptide, polypeptide fragment, or variant of the invention (e.g., a polypeptide or fragment or variant of the amino acid sequence of SEQ ID NO:Y or a polypeptide encoded by the cDNA contained in Clone ID NO:Z, and/or an epitope, of the present invention) as determined by immunoassays well known in the art for assaying specific antibody-antigen binding. Antibodies of the invention include, but are not limited to, polyclonal, monoclonal, multispecific, human, humanized or chimeric antibodies, single chain antibodies, Fab fragments, F(ab′) fragments, fragments produced by a Fab expression library, anti-idiotypic (anti-Id) antibodies (including, e.g., anti-Id antibodies to antibodies of the invention), intracellularly-made antibodies (i.e., intrabodies), and epitope-binding fragments of any of the above. The term “antibody,” as used herein, refers to immunoglobulin molecules and immunologically active portions of immunoglobulin molecules, i.e., molecules that contain an antigen binding site that immunospecifically binds an antigen. The immunoglobulin molecules of the invention can be of any type (e.g., IgG, IgE, IgM, IgD; IgA and IgY), class (e.g., IgG1, IgG2, IgG3, IgG4, IgA1 and IgA2) or subclass of immunoglobulin molecule. In preferred embodiments, the immunoglobulin molecules of the invention are IgG1. In other preferred embodiments, the immunoglobulin molecules of the invention are IgG4.

[0234] Most preferably the antibodies are human antigen-binding antibody fragments of the present invention and include, but are not limited to, Fab, Fab′ and F(ab′)₂, Fd, single-chain Fvs (scFv), single-chain antibodies, disulfide-linked Fvs (sdFv) and fragments comprising either a VL or VH domain. Antigen-binding antibody fragments, including single-chain antibodies, may comprise the variable region(s) alone or in combination with the entirety or a portion of the following: hinge region, CH1, CH2, and CH3 domains. Also included in the invention are antigen-binding fragments also comprising any combination of variable region(s) with a hinge region, CH1, CH2, and CH3 domains. The antibodies of the invention may be from any animal origin including birds and mammals. Preferably, the antibodies are human, murine (e.g., mouse and rat), donkey, ship rabbit, goat, guinea pig, camel, horse, or chicken. As used herein, “human” antibodies include antibodies having the amino acid sequence of a human immunoglobulin and include antibodies isolated from human immunoglobulin libraries or from animals transgenic for one or more human immunoglobulin and that do not express endogenous immunoglobulins, as described infra and, for example in, U.S. Pat. No. 5,939,598 by Kucherlapati et al.

[0235] The antibodies of the present invention may be monospecific, bispecific, trispecific or of greater multispecificity. Multispecific antibodies may be specific for different epitopes of a polypeptide of the present invention or may be specific for both a polypeptide of the present invention as well as for a heterologous epitope, such as a heterologous polypeptide or solid support material. See, e.g., PCT publications WO 93/17715; WO 92/08802; WO 91/00360; WO 92/05793; Tutt, et al., J. Immunol. 147:60-69 (1991); U.S. Pat. Nos. 4,474,893; 4,714,681; 4,925,648; 5,573,920; 5,601,819; Kostelny et al., J. Immunol. 148:1547-1553 (1992).

[0236] Antibodies of the present invention may be described or specified in terms of the epitope(s) or portion(s) of a polypeptide of the present invention which they recognize or specifically bind. The epitope(s) or polypeptide portion(s) may be specified as described herein, e.g., by N-terminal and C-terminal positions, or by size in contiguous amino acid residues, or listed in the Tables and Figures. Preferred epitopes of the invention include those shown in column 6 of Table 1A, as well as polynucleotides that encode these epitopes. Antibodies which specifically bind any epitope or polypeptide of the present invention may also be excluded. Therefore, the present invention includes antibodies that specifically bind polypeptides of the present invention, and allows for the exclusion of the same.

[0237] Antibodies of the present invention may also be described or specified in terms of their cross-reactivity. Antibodies that do not bind any other analog, ortholog, or homolog of a polypeptide of the present invention are included. Antibodies that bind polypeptides with at least 95%, at least 90%, at least 85%, at least 80%, at least 75%, at least 70%, at least 65%, at least 60%, at least 55%, and at least 50% identity (as calculated using methods Inown in the art and described herein) to a polypeptide of the present invention are also included in the present invention. In specific embodiments, antibodies of the present invention cross-react with murine, rat and/or rabbit homologs of human proteins and the corresponding epitopes thereof. Antibodies that do not bind polypeptides with less than 95%, less than 90%, less than 85%, less than 80%, less than 75%, less than 70%, less than 65%, less than 60%, less than 55%, and less than 50% identity (as calculated using methods known in the art and described herein) to a polypeptide of the present invention are also included in the present invention. In a specific embodiment, the above-described cross-reactivity is with respect to any single specific antigenic or immunogenic polypeptide, or combination(s) of 2, 3, 4, 5, or more of the specific antigenic and/or immunogenic polypeptides disclosed herein. Further included in the present invention are antibodies which bind polypeptides encoded by polynucleotides which hybridize to a polynucleotide of the present invention under stringent hybridization conditions (as described herein). Antibodies of the present invention may also be described or specified in terms of their binding affinity to a polypeptide of the invention. Preferred binding affinities include those with a dissociation constant or Kd less than 5×10² M, 10⁻² M, 5×10⁻³ M, 10⁻³ M, 5×10⁻⁴ M, 10⁻⁴ M, 5×10⁻⁵ M, 10⁻⁵ M, 5×10⁶ M, 10⁻⁶M, 5×10⁻⁷ M, 10⁻⁷ M, 5×10⁻⁸ M, 10⁻⁸ M, 5×10⁻⁹ M, 10⁻⁹ M, 5×10⁻¹⁰ M, 10⁻¹⁰ M, 5×10⁻¹¹ M, 10⁻¹¹ M, 5×10⁻¹² M, 10⁻¹² M, 5×10⁻¹³ M, 10⁻¹³ M, 5×10⁻¹⁴ M, 10⁻¹⁴ M, 5×10⁻¹⁵ M, or 10⁻¹⁵ M.

[0238] The invention also provides antibodies that competitively inhibit binding of an antibody to an epitope of the invention as determined by any method known in the art for determining competitive binding, for example, the immunoassays described herei-n. In preferred embodiments, the antibody competitively inhibits binding to the epitope by at least 95%, at least 90%, at least 85%, at least 80%, at least 75%, at least 70%, at least 60%, or at least 50%.

[0239] Antibodies of the present invention may act as agonists or antagonists of the polypeptides of the present invention. For example, the present invention includes antibodies which disrupt the receptor/ligand interactions with the polypeptides of the invention either partially or fully. Preferably, antibodies of the present invention bind an antigenic epitope disclosed herein, or a portion thereof. The invention features both receptor-specific antibodies and ligand-specific antibodies. The invention also features receptor-specific antibodies which do not prevent ligand binding but prevent receptor activation. Receptor activation (i.e., signaling) may be determined by techniques described herein or otherwise known in the art. For example, receptor activation can be determined by detecting the phosphorylation (e.g., tyrosine or serine/threonine) of the receptor or its substrate by immunoprecipitation followed by western blot analysis (for example, as described supra). In specific embodiments, antibodies are provided that inhibit ligand activity or receptor activity by at least 95%, at least 90%, at least 85%, at least 80%, at least 75%, at least 70%, at least 60%, or at least 50% of the activity in absence of the antibody.

[0240] The invention also features receptor-specific antibodies which both prevent ligand binding and receptor activation as well as antibodies that recognize the receptor-ligand complex, and, preferably, do not specifically recognize the unbound receptor or the unbound ligand. Likewise, included in the invention are neutralizing antibodies which bind the ligand and prevent binding of the ligand to the receptor, as well as antibodies which bind the ligand, thereby preventing receptor activation, but do not prevent the ligand from binding the receptor. Further included in the invention are antibodies which activate the receptor. These antibodies may act as receptor agonists, i.e., potentiate or activate either all or a subset of the biological activities of the ligand-mediated receptor activation, for example, by inducing dimerization of the receptor. The antibodies may be specified as agonists, antagonists or inverse agonists for biological activities comprising the specific biological activities of the peptides of the invention disclosed herein. The above antibody agonists can be made using methods known in the art. See, e.g., PCT publication WO 96/40281; U.S. Pat. No. 5,811,097; Deng et al., Blood 92(6):1981-1988 (1998); Chen et al., Cancer Res. 58(16):3668-3678 (1998); Harrop et al., J. Immunol. 161(4):1786-1794 (1998); Zhu et al., Cancer Res. 58(15):3209-3214 (1998); Yoon et al., J. 1 mmol. 160(7):3170-3179 (1998); Prat et al., J. Cell. Sci. 11 (Pt2):237-247 (1998); Pitard et al., J. Immunol. Methods 205(2):177-190 (1997); Liautard et al., Cytokine 9(4):233-241 (1997); Carlson et al., J. Biol. Chem. 272(17):11295-11301 (1997); Taryman et al., Neuron 14(4):755-762 (1995); Muller et al., Structure 6(9):1153-1167 (1998); Bartunek et al., Cytokine 8(1):14-20 (1996) (which are all incorporated by reference herein in their entireties).

[0241] Antibodies of the present invention may be used, for example, to purify, detect, and target the polypeptides of the present invention, including both in vitro and in vivo diagnostic and therapeutic methods. For example, the antibodies have utility in immunoassays for qualitatively and quantitatively measuring levels of the polypeptides of the present invention in biological samples. See, e.g., Harlow et al., Antibodies: A Laboratory Manual, (Cold Spring Harbor Laboratory Press, 2nd ed. 1988); incorporated by reference herein in its entirety.

[0242] As discussed in more detail below, the antibodies of the present invention may be used either alone or in combination with other compositions. The antibodies may further be recombinantly fused to a heterologous polypeptide at the N- or C-terminus or chemically conjugated (including covalent and non-covalent conjugations) to polypeptides or other compositions. For example, antibodies of the present invention may be recombinantly fused or conjugated to molecules useful as labels in detection assays and effector molecules such as heterologous polypeptides, drugs, radionuclides, or toxins. See, e.g., PCT publications WO 92/08495; WO 91/14438; WO 89/12624; U.S. Pat. No. 5,314,995; and EP 396,387; the disclosures of which are incorporated herein by reference in their entireties.

[0243] The antibodies of the invention include derivatives that are modified, i.e., by the covalent attachment of any type of molecule to the antibody such that covalent attachment does not prevent the antibody from generating an anti-idiotypic response. For example, but not by way of limitation, the antibody derivatives include antibodies that have been modified, e.g., by glycosylation, acetylation, pegylation, phosphylation, amidation, derivatization by known protecting/blocking groups, proteolytic cleavage, linkage to a cellular ligand or other protein, etc. Any of numerous chemical modifications may be carried out by known techniques, including, but not limited to specific chemical cleavage, acetylation, formylation, metabolic synthesis of tunicamycin, etc. Additionally, the derivative may contain one or more non-classical amino acids.

[0244] The antibodies of the present invention may be generated by any suitable method known in the art. Polyclonal antibodies to an antigen-of-interest can be produced by various procedures well known in the art. For example, a polypeptide of the invention can be administered to various host animals including, but not limited to, rabbits, mice, rats, etc. to induce the production of sera containing polyclonal antibodies specific for the antigen. Various adjuvants may be used to increase the immunological response, depending on the host species, and include but are not limited to, Freund's (complete and incomplete), mineral gels such as aluminum hydroxide, surface active substances such as lysolecithin, pluronic polyols, polyanions, peptides, oil emulsions, keyhole limpet hemocyanins, dinitrophenol, and potentially useful human adjuvants such as BCG (bacille Calmette-Guerin) and corynebacterium parvum. Such adjuvants are also well known in the art.

[0245] Monoclonal antibodies can be prepared using a wide variety of techniques known in the art including the use of hybridoma, recombinant, and phage display technologies, or a combination thereof. For example, monoclonal antibodies can be produced using hybridoma techniques including those known in the art and taught, for example, in Harlow et al., Antibodies: A Laboratory Manual, (Cold Spring Harbor Laboratory Press, 2nd ed. 1988); Hammerling, et al., in: Monoclonal Antibodies and T-Cell Hybridomas 563-681 (Elsevier, N.Y., 1981) (said references incorporated by reference in their entireties). The term “monoclonal antibody” as used herein is not limited to antibodies produced through hybridoma technology. The term “monoclonal antibody” refers to an antibody that is derived from a single clone, including any eukaryotic, prokaryotic, or phage clone, and not the method by which it is produced.

[0246] Methods for producing and screening for specific antibodies using hybridoma technology are routine and well known in the art and are discussed in detail in the Examples. In a non-limiting example, mice can be immunized with a polypeptide of the invention or a cell expressing such peptide. Once an immune response is detected, e.g., antibodies specific for the antigen are detected in the mouse serum, the mouse spleen is harvested and splenocytes isolated. The splenocytes are then fused by well known techniques to any suitable myeloma cells, for example cells from cell line SP2O available from the ATCC. Hybridomas are selected and cloned by limited dilution. The hybridoma clones are then assayed by methods known in the art for cells that secrete antibodies capable of binding a polypeptide of the invention. Ascites fluid, which generally contains high levels of antibodies, can be generated by immunizing mice with positive hybridoma clones.

[0247] Accordingly, the present invention provides methods of generating monoclonal antibodies as well as antibodies produced by the method comprising. culturing a hybridoma cell secreting an antibody of the invention wherein, preferably, the hybridoma is generated by fusing splenocytes isolated from a mouse immunized with an antigen of the invention with myeloma cells and then screening the hybridomas resulting from the fusion for hybridoma clones that secrete an antibody able to bind a polypeptide of the invention.

[0248] Another well known method for producing both polyclonal and monoclonal human B cell lines is transformation using Epstein Barr Virus (EBV). Protocols for generating EBV-transformed B cell lines are commonly known in the art, such as, for example, the protocol outlined in Chapter 7.22 of Current Protocols in Immunology, Coligan et al., Eds., 1994, John Wiley & Sons, NY, which is hereby incorporated in its entirety by reference herein. The source of B cells for transformation is commonly human peripheral blood, but B cells for transformation may also be derived from other sources including, but not limited to, lymph nodes, tonsil, spleen, tumor tissue, and infected tissues. Tissues are generally made into single cell suspensions prior to EBV transformation. Additionally, steps may be taken to either physically remove or inactivate T cells (e.g., by treatment with cyclosporin A) in B cell-containing samples, because T cells from individuals seropositive for anti-EBV antibodies can suppress B cell immortalization by EBV.

[0249] In general, the sample containing human B cells is innoculated with EBV, and cultured for 3-4 weeks. A typical source of EBV is the culture supernatant of the B95-8 cell line (ATCC #VR-1492). Physical signs of EBV transformation can generally be seen towards the end of the 3-4 week culture period. By phase-contrast microscopy, transformed cells may appear large, clear, hairy and tend to aggregate in tight clusters of cells. Initially, EBV lines are generally polyclonal. However, over prolonged periods of cell cultures, EBV lines may become monoclonal or polyclonal as a result of the selective outgrowth of particular B cell clones. Alternatively, polyclonal EBV transformed lines may be subcloned (e.g., by limiting dilution culture) or fused with a suitable fusion partner and plated at limiting dilution to obtain monoclonal B cell lines. Suitable fusion partners for EBV transformed cell lines include mouse myeloma cell lines (e.g., SP2/0, X63-Ag8.653), heteromyeloma cell lines (human x mouse; e.g, SPAM-8, SBC-H20, and CB-F7), and human cell lines (e.g., GM 1500, SKO-007, RPMI 8226, and KR-4). Thus, the present invention also provides a method of generating polyclonal or monoclonal human antibodies against polypeptides of the invention or fragments thereof, comprising EBV-transformation of human B cells.

[0250] Antibody fragments which recognize specific epitopes may be generated by known techniques. For example, Fab and F(ab′)₂ fragments of the invention may be produced by proteolytic cleavage of immunoglobulin molecules, using enzymes such as papain (to produce Fab fragments) or pepsin (to produce F(ab′)₂ fragments). F(ab′)₂ fragments contain the variable region, the light chain constant region and the CH1 domain of the heavy chain. For example, the antibodies of the present invention can also be generated using various phage display methods known in the art and as discussed in detail in the Examples (e.g., Example 10). In phage display methods, functional antibody domains are displayed on the surface of phage particles which carry the polynucleotide sequences encoding them. In a particular embodiment, such phage can be utilized to display antigen binding domains expressed from a repertoire or combinatorial antibody library (e.g., human or murine). Phage expressing an antigen binding domain that binds the antigen of interest can be selected or identified with antigen, e.g., using labeled antigen or antigen bound or captured to a solid surface or bead. Phage used in these methods are typically filamentous phage including fd and M13 binding domains expressed from phage with Fab, Fv or disulfide stabilized Fv antibody domains recombinantly fused to either the phage gene III or gene VIII protein. Examples of phage display methods that can be used to make the antibodies of the present invention include those disclosed in Brinkman et al., J. Immunol. Methods 182:41-50 (1995); Ames et al., J. Immunol. Methods 184:177-186 (1995); Kettleborough et al., Eur. J. Immunol. 24:952-958 (1994); Persic et al., Gene 187 9-18 (1997); Burton et al., Advances in Immunology 57:191-280 (1994); PCT application No. PCT/GB91/01134; PCT publications WO 90/02809; WO 91/10737; WO 92/01047; WO 92/18619; WO 93/11236; WO 95/15982; WO 95/20401; and U.S. Pat. Nos. 5,698,426; 5,223,409; 5,403,484; 5,580,717; 5,427,908; 5,750,753; 5,821,047; 5,571,698; 5,427,908; 5,516,637; 5,780,225; 5,658,727; 5,733,743 and 5,969,108; each of which is incorporated herein by reference in its entirety.

[0251] As described in the above references, after phage selection, the antibody coding regions from the phage can be isolated and used to generate whole antibodies, including human antibodies, or any other desired antigen binding fragment, and expressed in any desired host, including mammalian cells, insect cells, plant cells, yeast, and bacteria, e.g., as described in detail below. For example, techniques to recombinantly produce Fab, Fab′ and F(ab′)₂ fragments can also be employed using methods known in the art such as those disclosed in PCT publication WO 92/22324; Mullinax et al., BioTechniques 12(6):864-869 (1992); and Sawai et al., AJRI 34:26-34 (1995); and Better et al., Science 240:1041-1043 (1988) (said references incorporated by reference in their entireties).

[0252] Examples of techniques which can be used to produce single-chain Fvs and antibodies include those described in U.S. Pat. Nos. 4,946,778 and 5,258,498; Huston et al., Methods in Enzymology 203:46-88 (1991); Shu et al., PNAS 90:7995-7999 (1993); and Skerra et al., Science 240:1038-1040 (1988). For some uses, including in vivo use of antibodies in humans and in vitro detection assays, it may be preferable to use chimeric, humanized, or human antibodies. A chimeric antibody is a molecule in which different portions of the antibody are derived from different animal species, such as antibodies having a variable region derived from a murine monoclonal antibody and a human immunoglobulin constant region. Methods for producing chimeric antibodies are known in the art. See e.g., Morrison, Science 229:1202 (1985); Oi et al., BioTechniques 4:214 (1986); Gillies et al., (1989) J. Immunol. Methods 125:191-202; U.S. Pat. Nos. 5,807,715; 4,816,567; and 4,816,397, which are incorporated herein by reference in their entirety. Humanized antibodies are antibody molecules from non-human species antibody that binds the desired antigen having one or more complementarity determining regions (CDRs) from the non-human species and a framework regions from a human immunoglobulin molecule. Often, framework residues in the human framework regions will be substituted with the corresponding residue from the CDR donor antibody to alter, preferably improve, antigen binding. These framework substitutions are identified by methods well known in the art, e.g., by modeling of the interactions of the CDR and framework residues to identify framework residues important for antigen binding and sequence comparison to identify unusual framework residues at particular positions. (See, e.g., Queen et al., U.S. Pat. No. 5,585,089; Riechmann et al., Nature 332:323 (1988), which are incorporated herein by reference in their entireties.) Antibodies can be humanized using a variety of techniques known in the art including, for example, CDR-grafting (EP 239,400; PCT publication WO 91/09967; U.S. Pat. Nos. 5,225,539; 5,530,101; and 5,585,089), veneering or resurfacing (EP 592,106; EP 519,596; Padlan, Molecular Immunology 28(4/5):489-498 (1991); Studnicka et al., Protein Engineering 7(6):805-814 (1994); Roguska. et al., PNAS 91:969-973 (1994)), and chain shuffling (U.S. Pat. No. 5,565,332).

[0253] Completely human antibodies are particularly desirable for therapeutic treatment of human patients. Human antibodies can be made by a variety of methods known in the art including phage display methods described above using antibody libraries derived from human immunoglobulin sequences. See also, U.S. Pat. Nos. 4,444,887 and 4,716,111; and PCT publications WO 98/46645, WO 98/50433, WO 98/24893, WO 98/16654, WO 96/34096, WO 96/33735, and WO 91/10741; each of which is incorporated herein by reference in its entirety.

[0254] Human antibodies can also be produced using transgenic mice which are incapable of expressing functional endogenous immunoglobulins, but which can express human immunoglobulin genes. For example, the human heavy and light chain immunoglobulin gene complexes may be introduced randomly or by homologous recombination into mouse embryonic stem cells. Alternatively, the human variable region, constant region, and diversity region may be introduced into mouse embryonic stem cells in addition to the human heavy and light chain genes. The mouse heavy and light chain immunoglobulin genes may be rendered non-functional separately or simultaneously with the introduction of human immunoglobulin loci by homologous recombination. In particular, homozygous deletion of the JH region prevents endogenous antibody production. The modified embryonic stem cells are expanded and microinjected into blastocysts to produce chimeric mice. The chimeric mice are then bred to produce homozygous offspring which express human antibodies. The transgenic mice are immunized in the normal fashion with a selected antigen, e.g., all or a portion of a polypeptide of the invention. Monoclonal antibodies directed against the antigen can be obtained from the immunized, transgenic mice using conventional hybridoma technology. The human immunoglobulin transgenes harbored by the transgenic mice rearrange during B cell differentiation, and subsequently undergo class switching and somatic mutation. Thus, using such a technique, it is possible to produce therapeutically useful IgG, IgA, IgM and IgE antibodies. For an overview of this technology for producing human antibodies, see Lonberg and Huszar, Int. Rev. Immunol. 13:65-93 (1995). For a detailed discussion of this technology for producing human antibodies and human monoclonal antibodies and protocols for producing such antibodies, see, e.g., PCT publications WO 98/24893; WO 92/01047; WO 96/34096; WO 96/33735; European Patent No. 0 598 877; U.S. Pat. Nos. 5,413,923; 5,625,126; 5,633,425; 5,569,825; 5,661,016; 5,545,806; 5,814,318; 5,885,793; 5,916,771; 5,939,598; 6,075,181 and 6,114,598, which are incorporated by reference herein in their entirety. In addition, companies such as Abgenix, Inc. (Freemont, Calif.) and Genpharm (San Jose, Calif.) can be engaged to provide human antibodies directed against a selected antigen using technology similar to that described above.

[0255] Completely human antibodies which recognize a selected epitope can be generated using a technique referred to as “guided selection.” In this approach a selected non-human monoclonal antibody, e.g., a mouse antibody, is used to guide the selection of a completely human antibody recognizing the same epitope. (Jespers et al., Bio/technology 12:899-903 (1988)).

[0256] Further, antibodies to the polypeptides of the invention can, in turn, be utilized to generate anti-idiotype antibodies that “mimic polypeptides of the invention using techniques well known to those skilled in the art. (See, e.g., Greenspan & Bona, FASEB J. 7(5):437-444; (1989) and Nissinoff, J. Immunol. 147(8):2429-2438 (1991)). For example, antibodies which bind to and competitively inhibit polypeptide multimerization and/or binding of a polypeptide of the invention to a ligand can be used to generate anti-idiotypes that “mimic” the polypeptide multimerization and/or binding domain and, as a consequence, bind to and neutralize polypeptide and/or its ligand. Such neutralizing anti-idiotypes or Fab fragments of such anti-idiotypes can be used in therapeutic regimens to neutralize polypeptide ligand/receptor. For example, such anti-idiotypic antibodies can be used to bind a polypeptide of the invention and/or to bind its ligand(s)/receptor(s), and thereby block its biological activity. Alternatively, antibodies which bind to and enhance polypeptide multimerization and/or binding, and/or receptor/ligand multimerization, binding and/or signaling can be used to generate anti-idiotypes that function as agonists of a polypeptide of the invention and/or its ligand/receptor. Such agonistic anti-idiotypes or Fab fragments of such anti-idiotypes can be used in therapeutic regimens as agonists of the polypeptides of the invention or its ligand(s)/receptor(s). For example, such anti-idiotypic antibodies can be used to bind a polypeptide of the invention and/or to bind its ligand(s)/receptor(s), and thereby promote or enhance its biological activity.

[0257] Intrabodies of the invention can be produced using methods known in the art, such as those disclosed and reviewed in Chen et al., Hum. Gene Ther. 5:595-601 (1994); Marasco, W. A., Gene Ther. 4:11-15 (1997); Rondon and Marasco, Annu. Rev. Microbiol. 51:257-283 (1997); Proba et al., J. Mol. Biol. 275:245-253 (1998); Cohen et al., Oncogene 17:2445-2456 (1998); Ohage and Steipe, J. Mol. Biol. 291:1119-1128 (1999); Ohage et al., J. Alol. Biol. 291:1129-1134 (1999); Wirtz and Steipe, Protein Sci. 8:2245-2250 (1999); Zhu et al., J. Immunol. Methods 231:207-222 (1999); and references cited therein.

[0258] Polynucleotides Encoding Antibodies

[0259] The invention further provides polynucleotides comprising a nucleotide sequence encoding an antibody of the invention and fragments thereof. The invention also encompasses polynucleotides that hybridize under stringent or alternatively, under lower stringency hybridization conditions, e.g., as defined supra, to polynucleotides that encode an antibody, preferably, that specifically binds to a polypeptide of the invention, preferably, an antibody that binds to a polypeptide having the amino acid sequence of SEQ ID NO:Y, to a polypeptide encoded by a portion of SEQ ID NO:X as defined in columns 8 and 9 of Table 2, and/or to a polypeptide encoded by the cDNA contained in Clone ID NO:Z.

[0260] The polynucleotides may be obtained, and the nucleotide sequence of the polynucleotides determined, by any method known in the art. For example, if the nucleotide sequence of the antibody is known, a polynucleotide encoding the antibody may be assembled from chemically synthesized oligonucleotides (e.g., as described in Kutmeier et al., BioTechniques 17:242 (1994)), which, briefly, involves the synthesis of overlapping oligonucleotides containing portions of the sequence encoding the antibody, annealing and ligating of those oligonucleotides, and then amplification of the ligated oligonucleotides by PCR.

[0261] Alternatively, a polynucleotide encoding an antibody may be generated from nucleic acid from a suitable source. If a clone containing a nucleic acid encoding a particular antibody is not available, but the sequence of the antibody molecule is known, a nucleic acid encoding the immunoglobulin may be chemically synthesized or obtained from a suitable source (e.g., an antibody cDNA library, or a cDNA library generated from, or nucleic acid, preferably poly A+ RNA, isolated from, any tissue or cells expressing the antibody, such as hybridoma cells selected to express an antibody of the invention) by PCR amplification using synthetic primers hybridizable to the 3′ and 5′ ends of the sequence or by cloning using an oligonucleotide probe specific for the particular gene sequence to identify, e.g., a cDNA clone from a cDNA library that encodes the antibody. Amplified nucleic acids generated by PCR may then be cloned into replicable cloning vectors using any method well known in the art.

[0262] Once the nucleotide sequence and corresponding amino acid sequence of the antibody is determined, the nucleotide sequence of the antibody may be manipulated using methods well known in the art for the manipulation of nucleotide sequences, e.g., recombinant DNA techniques, site directed mutagenesis, PCR, etc. (see, for example, the techniques described in Sambrook et al., 1990, Molecular Cloning, A Laboratory Manual, 2d Ed., Cold Spring Harbor Laboratory, Cold Spring Harbor, N.Y. and Ausubel et al., eds., 1998, Current Protocols in Molecular Biology, John Wiley & Sons, NY, which are both incorporated by reference herein in their entireties), to generate antibodies having a different amino acid sequence, for example to create amino acid substitutions, deletions, and/or insertions.

[0263] In a specific embodiment, the amino acid sequence of the heavy and/or light chain variable domains may be inspected to identify the sequences of the complementarity determining regions (CDRs) by methods that are well know in the art, e.g., by comparison to known amino acid sequences of other heavy and light chain variable regions to determine the regions of sequence hypervariability. Using routine recombinant DNA techniques, one or more of the CDRs may be inserted within framework regions, e.g., into human framework regions to humanize a non-human antibody, as described supra. The framework regions may be naturally occurring or consensus framework regions, and preferably human framework regions (see, e.g., Chothia et al., J. Mol. Biol. 278: 457-479 (1998) for a listing of human framework regions). Preferably, the polynucleotide generated by the combination of the framework regions and CDRs encodes an antibody that specifically binds a polypeptide of the invention. Preferably, as discussed supra, one or more amino acid substitutions may be made within the framework regions, and, preferably, the amino acid substitutions improve binding of the antibody to its antigen. Additionally, such methods may be used to make amino acid substitutions or deletions of one or more variable region cysteine residues participating in an intrachain disulfide bond to generate antibody molecules lacking one or more intrachain disulfide bonds. Other alterations to the polynucleotide are encompassed by the present invention and within the skill of the art.

[0264] In addition, techniques developed for the production of “chimeric antibodies” (Morrison et al., Proc. Natl. Acad. Sci. 81:851-855 (1984); Neuberger et al., Nature 312:604-608 (1984); Takeda et al., Nature 314:452-454 (1985)) by splicing genes from a mouse antibody molecule of appropriate antigen specificity together with genes from a human antibody molecule of appropriate biological activity can be used. As described supra, a chimeric antibody is a molecule in which different portions are derived from different animal species, such as those having a variable region derived from a murine mAb and a human immunoglobulin constant region, e.g., humanized antibodies.

[0265] Alternatively, techniques described for the production of single chain antibodies (U.S. Pat. No. 4,946,778; Bird, Science 242:423-42 (1988); Huston et al., Proc. Natl. Acad. Sci. USA 85:5879-5883 (1988); and Ward et al., Nature 334:544-54 (1989)) can be adapted to produce single chain antibodies. Single chain antibodies are formed by linking the heavy and light chain fragments of the Fv region via an amino acid bridge, resulting in a single chain polypeptide. Techniques for the assembly of functional Fv fragments in E. coli may also be used (Skerra et al., Science 242:1038-1041 (1988)).

[0266] Methods of Producing Antibodies

[0267] The antibodies of the invention can be produced by any method known in the art for the synthesis of antibodies, in particular, by chemical synthesis or preferably, by recombinant expression techniques. Methods of producing antibodies include, but are not limited to, hybridoma technology, EBV transformation, and other methods discussed herein as well as through the use recombinant DNA technology, as discussed below.

[0268] Recombinant expression of an antibody of the invention, or fragment, derivative or analog thereof, (e.g., a heavy or light chain of an antibody of the invention or a single chain antibody of the invention), requires construction of an expression vector containing a polynucleotide that encodes the antibody. Once a polynucleotide encoding an antibody molecule or a heavy or light chain of an antibody, or portion thereof (preferably containing the heavy or light chain variable domain), of the invention has been obtained, the vector for the production of the antibody molecule may be produced by recombinant DNA technology using techniques well known in the art. Thus, methods for preparing a protein by expressing a polynucleotide containing an antibody encoding nucleotide sequence are described herein. Methods which are well known to those skilled in the art can be used to construct expression vectors containing antibody coding sequences and appropriate transcriptional and translational control signals. These methods include, for example, in vitro recombinant DNA techniques, synthetic techniques, and in vivo genetic recombination. The invention, thus, provides replicable vectors comprising a nucleotide sequence encoding an antibody molecule of the invention, or a heavy or light chain thereof, or a heavy or light chain variable domain, operably linked to a promoter. Such vectors may include the nucleotide sequence encoding the constant region of the antibody molecule (see, e.g., PCT Publication WO 86/05807; PCT Publication WO 89/01036; and U.S. Pat. No. 5,122,464) and the variable domain of the antibody may be cloned into such a vector for expression of the entire heavy or light chain.

[0269] The expression vector is transferred to a host cell by conventional techniques and the transfected cells are then cultured by conventional techniques to produce an antibody of the invention. Thus, the invention include's host cells containing a polynucleotide encoding an antibody of the invention, or a heavy or light chain thereof, or a single chain antibody of the invention, operably linked to a heterologous promoter. In preferred embodiments for the expression of double-chained antibodies, vectors encoding both the heavy and light chains may be co-expressed in the host cell for expression of the entire immunoglobulin molecule, as detailed below.

[0270] A variety of host-expression vector systems may be utilized to express the antibody molecules of the invention. Such host-expression systems represent vehicles by which the coding sequences of interest may be produced and subsequently purified, but also represent cells which may, when transformed or transfected with the appropriate nucleotide coding sequences, express an antibody molecule of the invention in situ. These include but are not limited to microorganisms such as bacteria (e.g., E. coli, B. subtilis) transformed with recombinant bacteriophage DNA, plasmid DNA or cosmid DNA expression vectors containing antibody coding sequences; yeast (e.g., Saccharomyces, Pichia) transformed with recombinant yeast expression vectors containing antibody coding sequences; insect cell systems infected with recombinant virus expression vectors (e.g., baculovirus) containing antibody coding sequences; plant cell systems infected with recombinant virus expression vectors (e.g., cauliflower mosaic virus, CaMV; tobacco mosaic virus, TMV) or transformed with recombinant plasmid expression vectors (e.g., Ti plasmid) containing antibody coding sequences; or mammalian cell systems (e.g., COS, CHO, BHK, 293, 3T3 cells) harboring recombinant expression constructs containing promoters derived from the genome of mammalian cells (e.g., metallothionein promoter) or from mammalian viruses (e.g., the adenovirus late promoter; the vaccinia virus 7.5K promoter). Preferably, bacterial cells such as Escherichia coli, and more preferably, eukaryotic cells, especially for the expression of whole recombinant antibody molecule, are used for the expression of a recombinant antibody molecule. For example, mammalian cells such as Chinese hamster ovary cells (CHO), in conjunction with a vector such as the major intermediate early gene promoter element from human cytomegalovirus is an effective expression system for antibodies (Foecking et al., Gene 45:101 (1986); Cockett et al., Bio/Technology 8:2 (1990)).

[0271] In bacterial systems, a number of expression vectors may be advantageously selected depending upon the use intended for the antibody molecule being expressed. For example, when a large quantity of such a protein is to be produced, for the generation of pharmaceutical compositions of an antibody molecule, vectors which direct the expression of high levels of fusion protein products that are readily purified may be desirable. Such vectors include, but are not limited, to the E. coli expression vector pUR278 (Ruther et al., EMBO J. 2:1791 (1983)), in which the antibody coding sequence may be ligated individually into the vector in frame with the lac Z coding region so that a fusion protein is produced; pIN vectors (Inouye & Inouye, Nucleic Acids Res. 13:3101-3109 (1985); Van Heeke & Schuster, J. Biol. Chem. 24:5503-5509 (1989)); and the like. pGEX vectors may also be used to express foreign polypeptides as fusion proteins with glutathione S-transferase (GST). In general, such fusion proteins are soluble and can easily be purified from lysed cells by adsorption and binding to matrix glutathione-agarose beads followed by elution in the presence of free glutathione. The pGEX vectors are designed to include thrombin or factor Xa protease cleavage sites so that the cloned target gene product can be released from the GST moiety.

[0272] In an insect system, Autographa californica nuclear polyhedrosis virus (AcNPV) is used as a vector to express foreign genes. The virus grows in Spodoptera frugiperda cells. The antibody coding sequence may be cloned individually into non-essential regions (for example the polyhedrin gene) of the virus and placed under control of an AcNPV promoter (for example the polyhedrin promoter).

[0273] In mammalian host cells, a number of viral-based expression systems may be utilized. In cases where an adenovirus is used as an expression vector, the antibody coding sequence of interest may be ligated to an adenovirus transcription/translation control complex, e.g., the late promoter and tripartite leader sequence. This chimeric gene may then be inserted in the adenovirus genome by in vitro or in vivo recombination. Insertion in a non-essential region of the viral genome (e.g., region E1 or E3) will result in a recombinant virus that is viable and capable of expressing the antibody molecule in infected hosts. (e.g., see Logan & Shenk, Proc. Natl. Acad. Sci. USA 81:355-359 (1984)). Specific initiation signals may also be required for efficient translation of inserted antibody coding sequences. These signals include the ATG initiation codon and adjacent sequences. Furthermore, the initiation codon must be in phase with the reading frame of the desired coding sequence to ensure translation of the entire insert. These exogenous translational control signals and initiation codons can be of a variety of origins, both natural and synthetic. The efficiency of expression may be enhanced by the inclusion of appropriate transcription enhancer elements, transcription terminators, etc. (see Bittner et al., Methods in Enzymol. 153:51-544 (1987)).

[0274] In addition, a host cell strain may be chosen which modulates the expression of the inserted sequences, or modifies and processes the gene product in the specific fashion desired. Such modifications (e.g., glycosylation) and processing (e.g., cleavage) of protein products may be important for the function of the protein. Different host cells have characteristic and specific mechanisms for the post-translational processing and modification of proteins and gene products. Appropriate cell lines or host systems can be chosen to ensure the correct modification and processing of the foreign protein expressed. To this end, eukaryotic host cells which possess the cellular machinery for proper processing of the primary transcript, glycosylation, and phosphorylation of the gene product may be used. Such mammalian host cells include but are not limited to CHO, VERY, BHK, Hela, COS, MDCK, 293, 3T3, W138, and in particular, breast cancer cell lines such as, for example, BT483, Hs578T, HTB2, BT20 and T47D, and normal mammary gland cell line such as, for example, CRL7030 and Hs578Bst.

[0275] For long-term, high-yield production of recombinant proteins, stable expression is preferred. For example, cell lines which stably express the antibody molecule may be engineered. Rather than using expression vectors which contain viral origins of replication, host cells can be transformed with DNA controlled by appropriate expression control elements (e.g., promoter, enhancer, sequences, transcription terminators, polyadenylation sites, etc.), and a selectable marker. Following the introduction of the foreign DNA, engineered cells may be allowed to grow for 1-2 days in an enriched media, and then are switched to a selective media. The selectable marker in the recombinant plasmid confers resistance to the selection and allows cells to stably integrate the plasmid into their chromosomes and grow to form foci which in turn can be cloned and expanded into cell lines. This method may advantageously be used to engineer cell lines which express the antibody molecule. Such engineered cell lines may be particularly useful in screening and evaluation of compounds that interact directly or indirectly with the antibody molecule.

[0276] A number of selection systems may be used, including but not limited to the herpes simplex virus thymidine kinase (Wigler et al., Cell 11:223 (1977)), hypoxanthine-guanine phosphoribosyltransferase (Szybalska & Szybalski, Proc. Natl. Acad. Sci. USA 48:202 (1992)), and adenine phosphoribosyltransferase (Lowy et al., Cell 22:817 (1980)) genes can be employed in tk-, hgprt- or aprt-cells, respectively. Also, antimetabolite resistance can be used as the basis of selection for the following genes: dhfr, which confers resistance to methotrexate (Wigler et al., Natl Acad. Sci. USA 77:357 (1980); O'Hare et al., Proc. Natl. Acad. Sci. USA 78:1527 (1981)); gpt, which confers resistance to mycophenolic acid (Mulligan & Berg, Proc. Natl. Acad. Sci. USA 78:2072 (1981)); neo, which confers resistance to the aminoglycoside G-418 Clinical Pharmacy 12:488-505; Wu and Wu, Biotherapy 3:87-95 (1991); Tolstoshev, Ann. Rev. Pharmacol. Toxicol. 32:573-596 (1993); Mulligan, Science 260:926-932 (1993); and Morgan and Anderson, Ann. Rev. Biochem. 62:191-217 (1993); TIB TECH 11(5):155-215 (1993)); and hygro, which confers resistance to hygromycin (Santerre et al., Gene 30:147 (1984)). Methods commonly known in the art of recombinant DNA technology may be routinely applied to select the desired recombinant clone, and such methods are described, for example, in Ausubel et al. (eds.), Current Protocols in Molecular Biology, John Wiley & Sons, NY (1993); Kriegler, Gene Transfer and Expression, A Laboratory Manual, Stockton Press, NY (1990); and in Chapters 12 and 13, Dracopoli et al. (eds), Current Protocols in Human Genetics, John Wiley & Sons, NY (1994); Colberre-Garapin et al., J. Mol. Biol. 150:1 (1981), which are incorporated by reference herein in their entireties.

[0277] The expression levels of an antibody molecule can be increased by vector amplification (for a review, see Bebbington and Hentschel, The use of vectors based on gene amplification for the expression of cloned genes in mammalian cells in DNA cloning, Vol.3. (Academic Press, New York, 1987)). When a marker in the vector system expressing antibody is amplifiable, increase in the level of inhibitor present in culture of host cell will increase the number of copies of the marker gene. Since the amplified region is associated with the antibody gene, production of the antibody will also increase (Crouse et al., Mol. Cell. Biol. 3:257 (1983)).

[0278] Vectors which use glutamine synthase (GS) or DHFR as the selectable markers can be amplified in the presence of the drugs methionine sulphoximine or methotrexate, respectively. An advantage of glutamine synthase based vectors are the availabilty of cell lines (e.g., the murine myeloma cell line, NSO) which are glutamine synthase negative. Glutamine synthase expression systems can also function in glutamine synthase expressing cells (e.g. Chinese Hamster Ovary (CHO) cells) by providing additional inhibitor to prevent the functioning of the endogenous gene. A glutamine synthase expression system and components thereof are detailed in PCT publications: WO87/04462; WO86/05807; WO89/01036; WO89/10404; and WO91/06657 which are incorporated in their entireties by reference herein. Additionally, glutamine synthase expression vectors that may be used according to the present invention are commercially available from suplliers, including, for example Lonza Biologics, Inc. (Portsmouth, N.H.). Expression and production of monoclonal antibodies using a GS expression system in murine myeloma cells is described in Bebbington et al., Bio/technology 10:169(1992) and in Biblia and Robinson Biotechnol. Prog. 11:1 (1995) which are incorporated in their entirities by reference herein.

[0279] The host cell may be co-transfected with two expression vectors of the invention, the first vector encoding a heavy chain derived polypeptide and the second vector encoding a light chain derived polypeptide. The two vectors may contain identical selectable markers which enable equal expression of heavy and light chain polypeptides. Alternatively, a single vector may be used which encodes, and is capable of expressing, both heavy and light chain polypeptides. In such situations, the light chain should be placed before the heavy chain to avoid an excess of toxic tree heavy chain (Proudfoot, Nature 322:52 (1986); Kohler, Proc. Natl. Acad. Sci. USA 77:2197 (1980)). The coding sequences for the heavy and light chains may comprise cDNA or genomic DNA.

[0280] Once an antibody molecule of the invention has been produced by an animal, chemically synthesized, or recombinantly expressed, it may be purified by any method known in the art for purification of an immunoglobulin molecule, for example, by chromatography (e.g., ion exchange, affinity, particularly by affinity for the specific antigen after Protein A, and sizing column chromatography), centrifugation, differential solubility, or by any other standard technique for the purification of proteins. In addition, the antibodies of the present invention or fragments thereof can be fused to heterologous polypeptide sequences described herein or otherwise known in the art, to facilitate purification.

[0281] The present invention encompasses antibodies recombinantly fused or chemically conjugated (including both covalently and non-covalently conjugations) to a polypeptide (or portion thereof, preferably at least 10, 20, 30, 40, 50, 60, 70, 80, 90 or 100 amino acids of the polypeptide) of the present invention to generate fusion proteins. The fusion does not necessarily need to be direct, but may occur through linker sequences. The antibodies may be specific for antigens other than polypeptides (or portion thereof, preferably at least 10, 20, 30, 40, 50, 60, 70, 80, 90 or 100 amino acids of the polypeptide) of the present invention. For example, antibodies may be used to target the polypeptides of the present invention to particular cell types, either in vitro or in vivo, by fusing or conjugating the polypeptides of the present invention to antibodies specific for particular cell surface receptors. Antibodies fused or conjugated to the polypeptides of the present invention may also be used in in vitro immunoassays and purification methods using methods known in the art. See e.g., Harbor et al., supra, and PCT publication WO 93/21232; EP 439,095; Naramura et al., Immunol. Lett. 39:91-99 (1994); U.S. Pat. No. 5,474,981; Gillies et al., PNAS 89:1428-1432 (1992); Fell et al., J. Immunol. 146:2446-2452 (1991), which are incorporated by reference in their entireties.

[0282] The present invention further includes compositions comprising the polypeptides of the present invention fused or conjugated to antibody domains other than the variable regions. For example, the polypeptides of the present invention may be fused or conjugated to an antibody Fc region, or portion thereof. The antibody portion fused to a polypeptide of the present invention may comprise the constant region, hinge region, CH1 domain, CH2 domain, and CH3 domain or any combination of whole domains or portions thereof. The polypeptides may also be fused or conjugated to the above antibody portions to form multimers. For example, Fc portions fused to the polypeptides of the present invention can form dimers through disulfide bonding between the Fc portions. Higher multimeric forms can be made by fusing the polypeptides to portions of IgA and IgM. Methods for fusing or conjugating the polypeptides of the present invention to antibody portions are known in the art. See, e.g., U.S. Pat. Nos. 5,336,603; 5,622,929; 5,359,046; 5,349,053; 5,447,851; 5,112,946; EP 307,434; EP 367,166; PCT publications WO 96/04388; WO 91/06570; Ashkenazi et al., Proc. Natl. Acad. Sci. USA 88:10535-10539 (1991); Zheng et al., J. Immunol. 154:5590-5600 (1995); and Vil et al., Proc. Natl. Acad. Sci. USA 89:11337-11341 (1992) (said references incorporated by reference in their entireties).

[0283] As discussed, supra, the polypeptides corresponding to a polypeptide, polypeptide fragment, or a variant of SEQ ID NO:Y may be fused or conjugated to the above antibody portions to increase the in vivo half life of the polypeptides or for use in immunoassays using methods known in the art. Further, the polypeptides corresponding to SEQ ID NO:Y may be fused or conjugated to the above antibody portions to facilitate purification. One reported example describes chimeric proteins consisting of the first two domains of the human CD4-polypeptide and various domains of the constant regions of the heavy or light chains of mammalian immunoglobulins. See EP 394,827; Traunecker et al., Nature 331:84-86 (1988). The polypeptides of the present invention fused or conjugated to an antibody having disulfide-linked dimeric structures (due to the IgG) may also be more efficient in binding and neutralizing other molecules, than the monomeric secreted protein or protein fragment alone. See, for example, Fountoulakis et al., J. Biochem. 270:3958-3964 (1995). In many cases, the Fc part in a fusion protein is beneficial in therapy and diagnosis, and thus can result in, for example, improved pharmacokinetic properties. See, for example, EP A 232,262. Alternatively, deleting the Fc part after the fusion protein has been expressed, detected, and purified, would be desired. For example, the Fc portion may hinder therapy and diagnosis if the fusion protein is used as an antigen for immunizations. In drug discovery, for example, human proteins, such as hlL-5, have been fused with Fc portions for the purpose of high-throughput screening assays to identify antagonists of hIL-5. (See, Bennett et al., J. Molecular Recognition 8:52-58 (1995); Johanson et al., J. Biol. Chem. 270:9459-9471 (1995)).

[0284] Moreover, the antibodies or fragments thereof of the present invention can be fused to marker sequences, such as a peptide to facilitate purification. In preferred embodiments, the marker amino acid sequence is a hexa-histidine peptide, such as the tag provided in a pQE vector (QIAGEN, Inc., 9259 Eton Avenue, Chatsworth, Calif., 91311), among others, many of which are commercially available. As described in Gentz et al., Proc. Natl. Acad. Sci. USA 86:821-824 (1989), for instance, hexa-histidine provides for convenient purification of the fusion protein. Other peptide tags useful for purification include, but are not limited to, the “HA” tag, which corresponds to an epitope derived from the influenza hemagglutinin protein (Wilson et al., Cell 37:767 (1984)) and the “flag” tag.

[0285] The present invention further encompasses antibodies or fragments thereof conjugated to a diagnostic or therapeutic agent. The antibodies can be used diagnostically to, for example, monitor the development or progression of a tumor as part of a clinical testing procedure to, e.g., determine the efficacy of a given treatment regimen. Detection can be facilitated by coupling the antibody to a detectable substance. Examples of detectable substances include various enzymes, prosthetic groups, fluorescent materials, luminescent materials, bioluminescent materials, radioactive materials, positron emitting metals using various positron emission tomographies, and nonradioactive paramagnetic metal ions. The detectable substance may be coupled or conjugated either directly to the antibody (or fragment thereof) or indirectly, through an intermediate (such as, for example, a linker known in the art) using techniques known in the art. See, for example, U.S. Pat. No. 4,741,900 for metal ions which can be conjugated to antibodies for use as diagnostics according to the present invention.

[0286] Further, an antibody or fragment thereof may be conjugated to a therapeutic moiety such as a cytotoxin, e.g., a cytostatic or cytocidal agent, a therapeutic agent or a radioactive metal ion, e.g., alpha-emitters such as, for example, 213Bi. A cytotoxin or cytotoxic agent includes any agent that is detrimental to cells. Examples include paclitaxol, cytochalasin B, gramicidin D, ethidium bromide, emetine, mitomycin, etoposide, tenoposide, vincristine, vinblastine, colchicin, doxorubicin, daunorubicin, dihydroxy anthracin dione, mitoxantrone, mithramycin, actinomycin D, 1-dehydrotestosterone, glucocorticoids, procaine, tetracaine, lidocaine, propranolol, and puromycin and analogs or homologs thereof. Therapeutic agents include, but are not limited to, antimetabolites (e.g., methotrexate, 6-mercaptopurine, 6-thioguanine, cytarabine, 5-fluorouracil decarbazine), alkylating agents (e.g., mechlorethamine, thioepa chlorambucil, melphalan, carmustine (BSNU) and lomustine (CCNU), cyclothosphamide, busulfan, dibromomannitol, streptozotocin, mitomycin C, and cis-dichlorodiamine platinum (II) (DDP) cisplatin), anthracyclines (e.g., daunorubicin (formerly daunomycin) and doxorubicin), antibiotics (e.g., dactinomycin (formerly actinomycin), bleomycin, mithramycin, and anthramycin (AMC)), and anti-mitotic agents (e.g., vincristine and vinblastine).

[0287] The conjugates of the invention can be used for modifying a given biological response, the therapeutic agent or drug moiety is not to be construed as limited to classical chemical therapeutic agents. For example, the drug moiety may be a protein or polypeptide possessing a desired biological activity. Such proteins may include, for example, a toxin such as abrin, ricin A, pseudomonas exotoxin, or diphtheria toxin; a protein such as tumor necrosis factor, a-interferon, β-interferon, nerve growth factor, platelet derived growth factor, tissue plasminogen activator, an apoptotic agent, e.g., TNF-alpha, TNF-beta, AIM I (See, International Publication No. WO 97/33899), AIM II (See, International Publication No. WO 97/34911), Fas Ligand (Takahashi et al., Int. Immunol., 6:1567-1574 (1994)), VEGI (See, International Publication No. WO 99/23105), a thrombotic agent or an anti-angiogenic agent, e.g., angiostatin or endostatin; or, biological response modifiers such as, for example, lymphokines, interleukin-1 (“IL-1”), interleukin-2 (“IL-2”), interleukin-6 (“IL-6”), granulocyte macrophage colony stimulating factor (“GM-CSF”), granulocyte colony stimulating factor (“G-CSF”), or other growth factors.

[0288] Antibodies may also be attached to solid supports, which are particularly useful for immunoassays or purification of the target antigen. Such solid supports include, but are not limited to, glass, cellulose, polyacrylamide, nylon, polystyrene, polyvinyl chloride or polypropylene.

[0289] Techniques for conjugating such therapeutic moiety to antibodies are well known. See, for example., Arnon et al., “Monoclonal Antibodies For Immunotargeting Of Drugs In Cancer Therapy”, in Monoclonal Antibodies And Cancer Therapy, Reisfeld et al. (eds.), pp. 243-56 (Alan R. Liss, Inc. 1985); Hellstrom et al., “Antibodies For Drug Delivery”, in Controlled Drug Delivery (2nd Ed.), Robinson et al., (eds.), pp. 623-53 (Marcel Dekker, Inc. 1987); Thorpe, “Antibody Carriers Of Cytotoxic Agents In Cancer Therapy: A Review”, in Monoclonal Antibodies '84: Biological And Clinical Applications, Pinchera et al. (eds.), pp. 475-506 (1985); “Analysis, Results, And Future Prospective Of The Therapeutic Use Of Radiolabeled Antibody In Cancer Therapy”, in Monoclonal Antibodies For Cancer Detection And Therapy, Baldwin et al. (eds.), pp. 303-16 (Academic Press 1985), and Thorpe et al., “The Preparation And Cytotoxic Properties Of Antibody-Toxin Conjugates”, Immunol. Rev. 62:119-58 (1982).

[0290] Alternatively, an antibody can be conjugated to a second antibody to form an antibody heteroconjugate as described by Segal in U.S. Pat. No. 4,676,980, which is incorporated herein by reference in its entirety.

[0291] An antibody, with or without a therapeutic moiety conjugated to it, administered alone or in combination with cytotoxic factor(s) and/or cytokine(s) can be used as a therapeutic.

[0292] Immunophenotyping

[0293] The antibodies of the invention may be utilized for immunophenotyping of cell lines and biological samples. Translation products of the genes of the present invention may be useful as cell specific markers, or more specifically as cellular markers that are differentially expressed at various stages of differentiation and/or maturation of particular cell types. Monoclonal antibodies directed against a specific epitope, or combination of epitopes, will allow for the screening of cellular populations expressing the marker. Various techniques can be utilized using monoclonal antibodies to screen for cellular populations expressing the marker(s), and include magnetic separation using antibody-coated magnetic beads, “panning” with antibody attached to a solid matrix (i.e., plate), and flow cytometry (See, e.g., U.S. Pat. No. 5,985,660; and Morrison et al., Cell, 96:737-49 (1999)).

[0294] These techniques allow for the screening of particular populations of cells, such as might be found with hematological malignancies (i.e. minimal residual disease (MRD) in acute leukemic patients) and “non-self” cells in transplantations to prevent Graft-versus-Host Disease (GVHD). Alternatively, these techniques allow for the screening of hematopoietic stem and progenitor cells capable of undergoing proliferation arid/or differentiation, as might be found in human umbilical cord blood.

[0295] Assays for Antibody Binding

[0296] The antibodies of the invention may be assayed for immunospecific binding by any method known in the art. The immunoassays which can be used include but are not limited to competitive and non-competitive assay systems using techniques such as western blots, radioimmunoassays, ELISA (enzyme linked immunosorbent assay), “sandwich” immunoassays, immunoprecipitation assays, precipitin reactions, gel diffusion precipitin reactions, immunodiffusion assays, agglutination assays, complement-fixation assays, immunoradiometric assays, fluorescent immunoassays, and protein A immunoassays, to name but a few. Such assays are routine and well known in the art (see, e.g., Ausubel et al, eds, 1994, Current Protocols in Molecular Biology, Vol. 1, John Wiley & Sons, Inc., New York, which is incorporated by reference herein in its entirety). Exemplary immunoassays are described briefly below (but are not intended by way of limitation).

[0297] Immunoprecipitation protocols generally comprise lysing a population of cells in a lysis buffer such as RIPA buffer (1% NP-40 or Triton X-100, 1% sodium deoxycholate, 0.1% SDS, 0.15 M NaCl, 0.01 M sodium phosphate at pH 7.2, 1% Trasylol) supplemented with protein phosphatase and/or protease inhibitors (e.g., EDTA, PMSF, aprotinin, sodium vanadate), adding the antibody of interest to the cell lysate, incubating for a period of time (e.g., 1-4 hours) at 4° C., adding protein A and/or protein G sepharose beads to the cell lysate, incubating for about an hour or more at 4° C., washing the beads in lysis buffer and resuspending the beads in SDS/sample buffer. The ability of the antibody of interest to immunoprecipitate a particular antigen can be assessed by, e.g., western blot analysis. One of skill in the art would be knowledgeable as to the parameters that can be modified to increase the binding of the antibody to an antigen and decrease the background (e.g., pre-clearing the cell lysate with sepharose beads). For further discussion regarding immunoprecipitation protocols see, e.g., Ausubel et al., eds., (1994), Current Protocols in Molecular Biology, Vol. 1, John Wiley & Sons, Inc., New York, section 10.16.1.

[0298] Western blot analysis generally comprises preparing protein samples, electrophoresis of the protein samples in a polyacrylamide gel (e.g., 8%-20% SDS-PAGE depending on the molecular weight of the antigen), transferring the protein sample from the polyacrylamide gel to a membrane such as nitrocellulose, PVDF or nylon, blocking the membrane in blocking solution (e.g., PBS with 3% BSA or non-fat milk), washing the membrane in washing buffer (e.g., PBS-Tween 20), blocking the membrane with primary antibody (the antibody of interest) diluted in blocking buffer, washing the membrane in washing buffer, blocking the membrane with a secondary antibody (which recognizes the primary antibody, e.g., an anti-human antibody) conjugated to an enzymatic substrate (e.g., horseradish peroxidase or alkaline phosphatase) or radioactive molecule (e.g., 32P or 125I) diluted in blocking buffer, washing the membrane in wash buffer, and detecting the presence of the antigen. One of skill in the art would be knowledgeable as to the parameters that can be modified to increase the signal detected and to reduce the background noise. For further discussion regarding western blot protocols see, e.g., Ausubel et al., eds., (1994), Current Protocols in Molecular Biology, Vol. 1, John Wiley & Sons, Inc., New York, section 10.8. 1.

[0299] ELISAs comprise preparing antigen, coating the well of a 96 well microtiter plate with the antigen, adding the antibody of interest conjugated to a detectable compound such as an enzymatic substrate (e.g., horseradish peroxidase or alkaline phosphatase) to the well and incubating for a period of time, and detecting the presence of the antigen. In ELISAs the antibody of interest does not have to be conjugated to a detectable compound; instead, a second antibody (which recognizes the antibody of interest) conjugated to a detectable compound may be added to the well. Further, instead of coating the well with the antigen, the antibody may be coated to the well. In this case, a second antibody conjugated to a detectable compound may be added following the addition of the antigen of interest to the coated well. One of skill in the art would be knowledgeable as to the parameters that can be modified to increase the signal detected as well as other variations of ELISAs known in the art. For further discussion regarding ELISAs see, e.g., Ausubel et al., eds., (1994), Current Protocols in Molecular Biology, Vol. 1, John Wiley & Sons, Inc., New York, section 11.2.1.

[0300] The binding affinity of an antibody to an antigen and the off-rate of an antibody-antigen interaction can be determined by competitive binding assays. One example of a competitive binding assay is a radioimmunoassay comprising the incubation of labeled antigen (e.g., 3H or ¹²⁵I) with the antibody of interest in the presence of increasing amounts of unlabeled antigen, and the detection of the antibody bound to the labeled antigen. The affinity of the antibody of interest for a particular antigen and the binding off-rates can be determined from the data by scatchard plot analysis. Competition with a second antibody can also be determined using radioimmunoassays. In this case, the antigen is incubated with antibody of interest conjugated to a labeled compound (e.g., 3H or 125I) in the presence of increasing amounts of an unlabeled second antibody.

[0301] Antibodies of the invention may be characterized using immunocytochemisty methods on cells (e.g., mammalian cells, such as CHO cells) transfected with a vector enabling the expression of an endocrine antigen or with vector alone using techniques commonly known in the art. Antibodies that bind endocrine antigen transfected cells, but not vector-only transfected cells, are endocrine antigen specific.

[0302] Therapeutic uses

[0303] The present invention is further directed to antibody-based therapies which involve administering antibodies of the invention to an animal, preferably a mammal, and most preferably a human, patient for treating one or more of the disclosed diseases, disorders, or conditions. Therapeutic compounds of the invention include, but are not limited to, antibodies of the invention (including fragments, analogs and derivatives thereof as described herein) and nucleic acids encoding antibodies of the invention (including fragments, analogs and derivatives thereof and anti-idiotypic antibodies as described herein). The antibodies of the invention can be used to treat, inhibit or prevent diseases, disorders or conditions associated with aberrant expression and/or activity of a polypeptide of the invention, including, but not limited to, any one or more of the diseases, disorders, or conditions described herein. The treatment and/or prevention of diseases, disorders, or conditions associated with aberrant expression and/or activity of a polypeptide of the invention includes, but is not limited to, alleviating symptoms associated with those diseases, disorders or conditions. Antibodies of the invention may be provided in pharmaceutically acceptable compositions as known in the art or as described herein.

[0304] In a specific and preferred embodiment, the present invention is directed to antibody-based therapies which involve administering antibodies of the invention to an animal, preferably a mammal, and most preferably a human, patient for detecting, diagnosing, preventing and/or treating one or more of the diseases, disorders, or conditions of the endocrine system, including, but not limited to, Addison's disease, Cushing's syndrome, Thyrotoxicosis, Graves™ disease, gigantism, pheochromocytoma, neuroblastoma, Berardinelli-Seip Congenital Lipodystrophy, Carney complex, Schmidt syndrome, precocious puberty, Borj eson-Forssman-Lehmann syndrome, Von Hippel-Lindau syndrome, Johanson-Blizzard syndrome, multiple endocrine neoplasia autoimmune polyendocrinopathy syndrome, Beckwith-Wiedemann syndrome, hyponatremia, cyclical mastalgia, invasive thymoma, toxic multinodular goitre, androgen-insensitivity syndrome, sertoli cell tumors, sex cord-stromal tumors, thyrotropin deficiency, Pendred syndrome, Thyrocerebroretinal syndrome, macrosomia adiposa congenita, adrenomyodystrophy, chromogranin, Retinohepatoendocrinologic syndrome, aniridia, adrenoleukodystrophy, Werner syndrome, Patterson pseudoleprechaunism syndrome, Rhyns syndrome, Bardet-Biedl syndrome, Reifenstein syndrome, chronic adrenocortical insufficiency and disorders and/or cancers of endocrine tissues, including but not limited to, pancreas (e.g., congenital pancreatic agenesis, diabetes mellitus, diabetes insipidis, pheochromocytoma—islet cell tumor syndrome, nesidioblastosis of pancreas, islet cell adenomatosis); adrenal cortex (e.g., adrenoleukodystrophy, adrenal hypoplasia, adrenocortical carcinoma); ovary (e.g., ovarian cancer, polycystic ovary syndrome); pituitary (e.g., hyper-, hypopituitarism, pituitary dwarfism, pituitary adenoma, panhypopituitarism, thyrotropin deficiency, pituitary cretinism, McCune-Albright syndrome, acromegaly, Albright hereditary osteodystrophy, Kallmann syndrome); thyroid (e.g., hyper-, hypothyroidism, thyroid hormone coupling detect, thymic aplasia, human thyroid carcinoma, Hurthie cell tumours of the thyroid, thyroid carcinoma, medullary thyroid carcinoma, myxedema and cretinism, congenital hypothyroidism); parathyroid (e.g., hyper-, hypoparathyroidism, hyperparathyroidism); hypothallamus; and testes (e.g., capillary haemangioma of the testis (benign), neoplasias of the testis and neo-testis, testicular regression syndrome) and/or as described under “Endocrine Disorders,” “Reproductive Disorders” and/or “Gastrointestinal Disorders” below. Therapeutic compounds of the invention include, but are not limited to, antibodies of the invention (e.g., antibodies directed to the full length protein expressed on the cell surface of a mammalian cell; antibodies directed to an epitope of an endocrine associated polypeptide of the invention (such as, a linear epitope (shown in Table 1A, column 6) or a conformational epitope), including fragments, analogs and derivatives thereof as described herein) and nucleic acids encoding antibodies of the invention (including fragments, analogs and derivatives thereof and anti-idiotypic antibodies as described herein). The antibodies of the invention can be used to treat, inhibit or prevent diseases, disorders or conditions associated with aberrant expression and/or activity of a polypeptide of the invention, including, but not limited to, any one or more of the diseases, disorders, or conditions of the endocrine system described herein. The treatment and/or prevention of diseases, disorders, or conditions of the endocrine. system associated with aberrant expression and/or activity of a polypeptide of the invention includes, but is not limited to, alleviating symptoms associated with those diseases, disorders or conditions. Antibodies of the invention may be provided in pharmaceutically acceptable compositions as known in the art or as described herein.

[0305] A summary of the ways in which the antibodies of the present invention may be used therapeutically includes binding polynucleotides or polypeptides of the present invention locally or systemically in the body or by direct cytotoxicity of the antibody, e.g. as mediated by complement (CDC) or by effector cells (ADCC). Some of these approaches are described in more detail below. Armed with the teachings provided herein, one of ordinary skill in the art will know how to use the antibodies of the present invention for diagnostic, monitoring or therapeutic purposes without undue experimentation.

[0306] The antibodies of this invention may be advantageously utilized in combination with other monoclonal or chimeric antibodies, or with lymphokines or hematopoietic growth factors (such as, e.g., IL-2, IL-3 and IL-7), for example, which serve to increase the number or activity of effector cells which interact with the antibodies.

[0307] The antibodies of the invention may be administered alone or in combination with other types of treatments (e.g., radiation therapy, chemotherapy, hormonal therapy, immunotherapy and anti-tumor agents). Generally, administration of products of a species origin or species reactivity (in the case of antibodies) that is the same species as that of the patient is preferred. Thus, in a preferred embodiment, human antibodies, fragments derivatives, analogs, or nucleic acids, are administered to a human patient for therapy or prophylaxis.

[0308] It is preferred to use high affinity and/or potent in vivo inhibiting and/or neutralizing antibodies against polypeptides or polynucleotides of the present invention, fragments or regions thereof, for both immunoassays directed to and therapy of disorders related to polynucleotides or polypeptides, including fragments thereof, of the present invention. Such antibodies, fragments, or regions, will preferably have an affinity for polynucleotides or polypeptides of the invention, including fragments thereof. Preferred binding affinities include those with a dissociation constant or Kd less than 5×10⁻² M, 10⁻² M, 5×10⁻³ M, 10⁻³ M, 5×10⁻⁴ M, 10⁻⁴ M, 5×10⁻⁵ M, 10⁻⁵ M, 5×10⁻⁶ M, 10⁻⁶ M, 5×10⁻⁷ M, 10⁻⁷ M, 5×10⁻⁸ M, 10⁻⁸ M, 5×10⁹ M, 10⁻⁹ M, 5×10⁻¹⁰ M, 10⁻¹⁰ M, 5×10⁻¹¹ M, 10⁻¹¹ M, 5×10⁻¹² M, 10⁻¹² M, 5×10⁻¹³ M, 10⁻¹³ M, 5×10⁻¹⁴ M, 10⁻¹⁴ M, 5×10⁻¹⁵ M, and 10⁻¹⁵ M.

[0309] Gene Therapy

[0310] In a specific embodiment, nucleic acids comprising sequences encoding antibodies or functional derivatives thereof, are administered to treat, inhibit or prevent a disease or disorder associated with aberrant expression and/or activity of a polypeptide of the invention, by way of gene therapy. Gene therapy refers to therapy performed by the administration to a subject of an expressed or expressible nucleic acid. In this embodiment of the invention, the nucleic acids produce their encoded protein that mediates a therapeutic effect.

[0311] Any of the methods for gene therapy available in the art can be used according to the present invention. Exemplary methods are described below.

[0312] For general reviews of the methods of gene therapy, see Goldspiel et al., Clinical Pharmacy 12:488-505 (1993); Wu and Wu, Biotherapy 3:87-95 (1991); Tolstoshev, Ann. Rev. Pharmacol. Toxicol. 32:573-596 (1993); Mulligan, Science 260:926-932 (1993); and Morgan and Anderson, Ann. Rev. Biochem. 62:191-217 (1993); May, TIBTECH 11(5):155-215 (1993). Methods commonly known in the art of recombinant DNA technology which can be used are described in Ausubel et al. (eds.), Current Protocols in Molecular Biology, John Wiley & Sons, NY (1993); and Kriegler, Gene Transfer and Expression, A Laboratory Manual, Stockton Press, NY (1990).

[0313] In a preferred embodiment, the compound comprises nucleic acid sequences encoding an antibody, said nucleic acid sequences being part of expression vectors that express the antibody or fragments or chimeric proteins or heavy or light chains thereof in a suitable host. In particular, such nucleic acid sequences have promoters operably linked to the antibody coding region, said promoter being inducible or constitutive, and, optionally, tissue-specific. In another particular embodiment, nucleic acid molecules are used in which the antibody coding sequences and any other desired sequences are flanked by regions that promote homologous recombination at a desired site in the genome, thus providing for intrachromosomal expression of the antibody encoding nucleic acids (Koller and Smithies, Proc. Natl. Acad. Sci. USA 86:8932-8935 (1989); Zijlstra et al., Nature 342:435-438 (1989). In specific embodiments, the expressed antibody molecule is a single chain antibody; alternatively, the nucleic acid sequences include sequences encoding both the heavy and light chains, or fragments thereof, of the antibody.

[0314] Delivery of the nucleic acids into a patient may be either direct, in which case the patient is directly exposed to the nucleic acid or nucleic acid-carrying vectors, or indirect, in which case, cells are first transformed with the nucleic acids in vitro, then transplanted into the patient. These two approaches are known, respectively, as in vivo or ex vivo gene therapy.

[0315] In a specific embodiment, the nucleic acid sequences are directly administered in vivo, where it is expressed to produce the encoded product. This can be accomplished by any of numerous methods known in the art, e.g., by constructing them as part of an appropriate nucleic acid expression vector and administering it so that they become intracellular, e.g., by infection using defective or attenuated retrovirals or other viral vectors (see U.S. Pat. No. 4,980,286), or by direct injection of naked DNA, or by use of microparticle bombardment (e.g., a gene gun; Biolistic, Dupont), or coating with lipids or cell-surface receptors or transfecting agents, encapsulation in liposomes, microparticles, or microcapsules, or by administering them in linkage to a peptide which is known to enter the nucleus, by administering it in linkage to a ligand subject to receptor-mediated endocytosis (see, e.g., Wu and Wu, J. Biol. Chem. 262:4429-4432 (1987)) (which can be used to target cell types specifically expressing the receptors), etc. In another embodiment, nucleic acid-ligand complexes can be formed in which the ligand comprises a fusogenic viral peptide to disrupt endosomes, allowing the nucleic acid to avoid lysosomal degradation. In yet another embodiment, the nucleic acid can be targeted in vivo for cell specific uptake and expression, by targeting a specific receptor (see, e.g., PCT Publications WO 92/06180; WO 92/22635; WO92/20316; WO93/14188, WO 93/20221). Alternatively, the nucleic acid can be introduced intracellularly and incorporated within host cell DNA for expression, by homologous recombination (Koller and Smithies, Proc. Natl. Acad. Sci. USA 86:8932-8935 (1989); Zijlstra et al., Nature 342:435-438 (1989)).

[0316] In a specific embodiment, viral vectors that contains nucleic acid sequences encoding an antibody of the invention are used. For example, a retroviral vector can be used (see Miller et al., Meth. Enzymol. 217:581-599 (1993)). These retroviral vectors contain the components necessary for the correct packaging of the viral genome and integration into the host cell DNA. The nucleic acid sequences encoding the antibody to be used in gene therapy are cloned into one or more vectors, which facilitates delivery of the gene into a patient. More detail about retroviral vectors can be found in Boesen et al., Biotherapy 6:291-302 (1994), which describes the use of a retroviral vector to deliver the mdr1 gene to hematopoietic stem cells in order to make the stem cells more resistant to chemotherapy. Other references illustrating the use of retroviral vectors in gene therapy are: Clowes et al., J. Clin. Invest. 93:644-651 (1994); Kiem et al., Blood 83:1467-1473 (1994); Salmons and Gunzberg, Human Gene Therapy 4:129-141 (1993); and Grossman and Wilson, Curr. Opin. in Genetics and Devel. 3:110-114 (1993).

[0317] Adenoviruses are other viral vectors that can be used in gene therapy. Adenoviruses are especially attractive vehicles for delivering genes to respiratory epithelia. Adenoviruses naturally infect respiratory epithelia where they cause a mild disease. Other targets for adenovirus-based delivery systems are liver, the central nervous system, endothelial cells, and muscle. Adenoviruses have the advantage of being capable of infecting non-dividing cells. Kozarsky and Wilson, Current Opinion in Genetics and Development 3:499-503 (1993) present a review of adenovirus-based gene therapy. Bout et al., Human Gene Therapy 5:3-10 (1994) demonstrated the use of adenovirus vectors to transfer genes to the respiratory epithelia of rhesus monkeys. Other instances of the use of adenoviruses in gene therapy can be found in Rosenfeld et al., Science 252:431-434 (1991); Rosenfeld et al., Cell 68:143-155 (1992); Mastrangeli et al., J. Clin. Invest. 91:225-234 (1993); PCT Publication WO94/12649; and Wang, et al., Gene Therapy 2:775-783 (1995). In a preferred embodiment, adenovirus vectors are used.

[0318] Adeno-associated virus (AAV) has also been proposed for use in gene therapy (Walsh et al., Proc. Soc. Exp. Biol. Med. 204:289-300 (1993); U.S. Pat. No. 5,436,146).

[0319] Another approach to gene therapy involves transferring a gene to cells in tissue culture by such methods as electroporation, lipofection, calcium phosphate mediated transfection, or viral infection. Usually, the method of transfer includes the transfer of a selectable marker to the cells. The cells are then placed under selection to isolate those cells that have taken up and are expressing the transferred gene. Those cells are then delivered to a patient.

[0320] In this embodiment, the nucleic acid is introduced into a cell prior to administration in vivo of the resulting recombinant cell. Such introduction can be carried out by any method known in the art, including but not limited to transfection, electroporation, microinjection, infection with a viral or bacteriophage vector containing the nucleic acid sequences, cell fusion, chromosome-mediated gene transfer, microcell-mediated gene transfer, spheroplast fusion, etc. Numerous techniques are known in the art for the introduction of foreign genes into cells (see, e.g., Loeffler and Behr, Meth. Enzymol. 217:599-618 (1993); Cohen et al., Meth. Enzymol. 217:618-644 (1993); Cline, Pharmac. Ther. 29:69-92m (1985) and may be used in accordance with the present invention, provided that the necessary developmental and physiological functions of the recipient cells are not disrupted. The technique should provide for the stable transfer of the nucleic acid to the cell, so that the nucleic acid is expressible by the cell and preferably heritable and expressible by its cell progeny.

[0321] The resulting recombinant cells can be delivered to a patient by various methods known in the art. Recombinant blood cells (e.g., hematopoietic stem or progenitor cells) are preferably administered intravenously. The amount of cells envisioned for use depends on the desired effect, patient state, etc., and can be determined by one skilled in the art.

[0322] Cells into which a nucleic acid can be introduced for purposes of gene therapy encompass any desired, available cell type, and include but are not limited to epithelial cells, endothelial cells, keratinocytes, fibroblasts, muscle cells, hepatocytes; blood cells such as T lymphocytes, B lymphocytes, monocytes, macrophages, neutrophils, eosinophils, megakaryocytes, granulocytes; various stem or progenitor cells, in particular hematopoietic stem or progenitor cells, e.g., as obtained from bone marrow, umbilical cord blood, peripheral blood, fetal liver, etc.

[0323] In a preferred embodiment, the cell used for gene therapy is autologous to the patient.

[0324] In an embodiment in which recombinant cells are used in gene therapy, nucleic acid sequences encoding an antibody are introduced into the cells such that they are expressible by the cells or their progeny, and the recombinant cells are then administered in vivo for therapeutic effect. In a specific embodiment, stem or progenitor cells are used. Any stem and/or progenitor cells which can be isolated and maintained in vitro can potentially be used in accordance with this embodiment of the present invention (see e.g. PCT Publication WO 94/08598; Stemple and Anderson, Cell 71:973-985 (1992); Rheinwald, Meth. Cell Bio. 21A:229 (1980); and Pittelkow and Scott, Mayo Clinic Proc. 61:771 (1986)).

[0325] In a specific embodiment, the nucleic acid to be introduced for purposes of gene therapy comprises an inducible promoter operably linked to the coding region, such that expression of the nucleic acid is controllable by the presence or absence of an appropriate inducer of transcription.

[0326] Demonstration of Therapeutic or Prophylactic Activity

[0327] The compounds or pharmaceutical compositions of the invention are preferably tested in vitro, and then in vivo for the desired therapeutic or prophylactic activity, prior to use in humans. For example, in vitro assays to demonstrate the therapeutic or prophylactic utility of a compound or pharmaceutical composition include, the effect of a compound on a cell line or a patient tissue sample. The effect of the compound or composition on the cell line and/or tissue sample can be determined utilizing techniques known to those of skill in the art including, but not limited to, rosette formation assays and cell lysis assays. In accordance with the invention, in vitro assays which can be used to determine whether administration of a specific compound is indicated, include in vitro cell culture assays in which a patient tissue sample is grown in culture, and exposed to or otherwise administered a compound, and the effect of such compound upon the tissue sample is observed.

[0328] Therapeutic/Prophylactic Administration and Composition

[0329] The invention provides methods of treatment, inhibition and prophylaxis by administration to a subject of an effective amount of a compound or pharmaceutical composition of the invention, preferably a polypeptide or antibody of the invention. In a preferred embodiment, the compound is substantially purified (e.g., substantially free from substances that limit its effect or produce undesired side-effects). The subject is preferably an animal, including but not limited to-animals such as cows, pigs, horses, chickens, cats, dogs, etc., and is preferably a mammal, and most preferably human.

[0330] Formulations and methods of administration that can be employed when the compound comprises a nucleic acid or an immunoglobulin are described above; additional appropriate formulations and routes of administration can be selected from among those described herein below.

[0331] Various delivery systems are known and can be used to administer a compound of the invention, e.g., encapsulation in liposomes, microparticles, microcapsules, recombinant cells capable of expressing the compound, receptor-mediated endocytosis (see, e.g., Wu and Wu, J. Biol. Chem. 262:4429-4432 (1987)), construction of a nucleic acid as part of a retroviral or other vector, etc. Methods of introduction include but are not limited to intradermal, intramuscular, intraperitoneal, intravenous, subcutaneous, intranasal, epidural, and oral routes. The compounds or compositions may be administered by any convenient route, for example by infusion or bolus injection, by absorption through epithelial or mucocutaneous linings (e.g., oral mucosa, rectal and intestinal mucosa, etc.) and may be administered together with other biologically active agents. Administration can be systemic or local. In addition, it may be desirable to introduce the pharmaceutical compounds or compositions of the invention into the central nervous system by any suitable route, including intraventricular and intrathecal injection; intraventricular injection may be facilitated by an intraventricular catheter, for example, attached to a reservoir, such as an Ommaya reservoir. Pulmonary administration can also be employed, e.g., by use of an inhaler or nebulizer, and formulation with an aerosolizing agent.

[0332] In a specific embodiment, it may be desirable to administer the pharmaceutical compounds or compositions of the invention locally to the area in need of treatment; this may be achieved by, for example, and not by way of limitation, local infusion during surgery, topical application, e.g., in conjunction with a wound dressing after surgery, by injection, by means of a catheter, by means of a suppository, or by means of an implant, said implant being of a porous, non-porous, or gelatinous material, including membranes, such as sialastic membranes, or fibers. Preferably, when administering a protein, including an antibody, of the invention, care must be taken to use materials to which the protein does not absorb.

[0333] In another embodiment, the compound or composition can be delivered in a vesicle, in particular a liposome (see Langer, Science 249:1527-1533 (1990); Treat et al., in Liposomes in the Therapy of Infectious Disease and Cancer, Lopez-Berestein and Fidler (eds.), Liss, New York, pp. 353-365 (1989); Lopez-Berestein, ibid., pp. 317-327; see generally ibid.)

[0334] In yet another embodiment, the compound or composition can be delivered in a controlled release system. In one embodiment, a pump may be used (see Langer, supra; Sefton, CRC Crit. Ref. Biomed. Eng. 14:201 (1987); Buchwald et al., Surgery 88:507 (1980); Saudek et al., N. Engl. J. Med. 321:574 (1989)). In another embodiment, polymeric materials can be used (see Medical Applications of Controlled Release, Langer and Wise (eds.), CRC Pres., Boca Raton; Fla. (1974); Controlled Drug Bioavailability, Drug Product Design and Performance, Smolen and Ball (eds.), Wiley, New York (1984); Ranger and Peppas, J., Macromol. Sci. Rev. Macromol. Chem. 23:61 (1983); see also Levy et al., Science 228:190 (1985); During et al., Ann. Neurol. 25:351 (1989); Howard et al., J.Neurosurg. 71:105 (1989)). In yet another embodiment, a controlled release system can be placed in proximity of the therapeutic target, e.g., the brain, thus requiring only a fraction of the systemic dose (see, e.g., Goodson, in Medical Applications of Controlled Release, supra, vol. 2, pp. 115-138 (1984)).

[0335] Other controlled release systems are discussed in the review by Langer (Science 249: 1527-1533 (1990)).

[0336] In a specific embodiment where the compound of the invention is a nucleic acid encoding a protein, the nucleic acid can be administered in vivo to promote expression of its encoded protein, by constructing it as part of an appropriate nucleic acid expression vector and administering it so that it becomes intracellular, e.g., by use of a retroviral vector (see U.S. Pat. No. 4,980,286), or by direct injection, or by use of microparticle bombardment (e.g., a gene gun; Biolistic, Dupont), or coating with lipids or cell-surface receptors or transfecting agents, or by administering it in linkage to a homeobox-like peptide which is known to enter the nucleus (see e.g., Joliot et al., Proc. Natl. Acad. Sci. USA 88:1864-1868 (1991)), etc. Alternatively, a nucleic acid can be introduced intracellularly and incorporated within host cell DNA for expression, by homologous recombination.

[0337] The present invention also provides pharmaceutical compositions. Such compositions comprise a therapeutically effective amount of a compound, and a pharmaceutically acceptable carrier. In a specific embodiment, the term “pharmaceutically acceptable” means approved by a regulatory agency of the Federal or a state government or listed in the U.S. Pharmacopeia or other generally recognized pharmacopeia for use in animals, and more particularly in humans. The term “carrier” refers to a diluent, adjuvant, excipient, or vehicle with which the therapeutic is administered. Such pharmaceutical carriers can be sterile liquids, such as water and oils, including those of petroleum, animal, vegetable or synthetic origin, such as peanut oil, soybean oil, mineral oil, sesame oil and the like. Water is a preferred carrier when the pharmaceutical composition is administered intravenously. Saline solutions and aqueous dextrose and glycerol solutions can also be employed as liquid carriers, particularly for injectable solutions. Suitable pharmaceutical excipients include starch, glucose, lactose, sucrose, gelatin, malt, rice, flour, chalk, silica gel, sodium stearate, glycerol monostearate, talc, sodium chloride, dried skim milk, glycerol, propylene, glycol, water, ethanol and the like. The composition, if desired, can also contain minor amounts of wetting or emulsifying agents, or pH buffering agents. These compositions can take the form of solutions, suspensions, emulsion, tablets, pills, capsules, powders, sustained-release formulations and the like. The composition can be formulated as a suppository, with traditional binders and carriers such as triglycerides. Oral formulation can include standard carriers such as pharmaceutical grades of mannitol, lactose, starch, magnesium stearate, sodium saccharine, cellulose, magnesium carbonate, etc. Examples of suitable pharmaceutical carriers are described in “Remington's Pharmaceutical Sciences” by E. W. Martin. Such compositions will contain a therapeutically effective amount of the compound, preferably in purified form, together with a suitable amount of carrier so as to provide the form for proper administration to the patient. The formulation should suit the mode of administration.

[0338] In a preferred embodiment, the composition is formulated in accordance with routine procedures as a pharmaceutical composition adapted for intravenous administration to human beings. Typically, compositions for intravenous administration are solutions in sterile isotonic aqueous buffer. Where necessary, the composition may also include a solubilizing agent and a local anesthetic such as lignocaine to ease pain at the site of the injection. Generally, the ingredients are supplied either separately or mixed together in unit dosage form, for example, as a dry lyophilized powder or water free concentrate in a hermetically sealed container such as an ampoule or sachette indicating the quantity of active agent. Where the composition is to be administered by infusion, it can be dispensed with an infusion bottle containing sterile pharmaceutical grade water or saline. Where the composition is administered by injection, an ampoule of sterile water for injection or saline can be provided so that the ingredients may be mixed prior to administration.

[0339] The compounds of the invention can be formulated as neutral or salt forms. Pharmaceutically acceptable salts include those formed with anions such as those derived from hydrochloric, phosphoric, acetic, oxalic, tartaric acids, etc., and those formed with cations such as those derived from sodium, potassium, ammonium, calcium, ferric hydroxides, isopropylamine, triethylamine, 2-ethylamino ethanol, histidine, procaine, etc.

[0340] The amount of the compound of the invention which will be effective in the treatment, inhibition and prevention of a disease or disorder associated with aberrant expression and/or activity of a polypeptide of the invention can be determined by standard clinical techniques. In addition, in vitro assays may optionally be employed to help identify optimal dosage ranges. The precise dose to be employed in the formulation will also depend on the route of administration, and the seriousness of the disease or disorder, and should be decided according to the judgment of the practitioner and each patient's circumstances. Effective doses may be extrapolated from dose-response curves derived from in vitro or animal model test systems.

[0341] For antibodies, the dosage administered to a patient is typically 0.1 mg/kg to 100 mg/kg of the patient's body weight. Preferably, the dosage administered to a patient is between 0.1 mg/kg and 20 mg/kg of the patient's body weight, more preferably 1 mg/kg to 10 mg/kg of the patient's body weight. Generally, human antibodies have a longer half-life within the human body than antibodies from other species due to the immune response to the foreign polypeptides. Thus, lower dosages of human antibodies and less frequent administration is often possible. Further, the dosage and frequency of administration of antibodies of the invention may be reduced by enhancing uptake and tissue penetration (e.g., into the brain) of the antibodies by modifications such as, for example, lipidation.

[0342] The invention also provides a pharmaceutical pack or kit comprising one or more containers filled with one or more of the ingredients of the pharmaceutical compositions of the invention. Optionally associated with such container(s) can be a notice in the form prescribed by a governmental agency regulating the manufacture, use or sale of pharmaceuticals or biological products, which notice reflects approval by the agency of manufacture, use or sale for human administration.

[0343] Diagnosis and Imaging

[0344] Labeled antibodies, and derivatives and analogs thereof, which specifically bind to a polypeptide of interest can be used for diagnostic purposes to detect, diagnose, or monitor diseases, disorders, and/or conditions associated with the aberrant expression and/or activity of a polypeptide of the invention. The invention provides for the detection of aberrant expression of a polypeptide of interest, comprising (a) assaying the expression of the polypeptide of interest in cells or body fluid of an individual using one or more antibodies specific to the polypeptide interest and (b) comparing the level of gene expression with a standard gene expression level, whereby an increase or decrease in the assayed polypeptide gene expression level compared to the standard expression level is indicative of aberrant expression.

[0345] The invention provides a diagnostic assay for diagnosing an endocrine system disorder, comprising (a) assaying the expression of the polypeptide of interest in cells or body fluid of an individual using one or more antibodies specific to the polypeptide interest and (b) comparing the level of gene expression with a standard gene expression level, whereby an increase or decrease in the assayed polypeptide gene expression level compared to the standard expression level is indicative of a particular disorder. With respect to cancer, the presence of a relatively high amount of transcript in biopsied tissue from an individual may indicate a predisposition for the development of the disease, or may provide a means for detecting the disease prior to the appearance of actual clinical symptoms. A more definitive diagnosis of this type may allow health professionals to employ preventative measures or aggressive treatment earlier thereby preventing the development or further progression of the cancer.

[0346] Antibodies of the invention can be used to assay protein levels in a biological sample using classical immunohistological methods known to those of skill in the art (e.g., see Jalkanen et al., J. Cell. Biol. 101:976-985 (1985); Jalkanen et al., J. Cell. Biol. 105:3087-3096 (1987)). Other antibody-based methods useful for detecting protein gene expression include immunoassays, such as the enzyme linked immunosorbent assay (ELISA) and the radioimmunoassay (RIA). Suitable antibody assay labels are known in the art and include enzyme labels, such as, glucose oxidase; radioisotopes, such as iodine (125I, 121I), carbon (14C), sulfur (35S), tritium (3H), indium (112In), and technetium (99Tc); luminescent labels, such as luminol; and fluorescent labels, such as fluorescein and rhodamine, and biotin.

[0347] One facet of the invention is the detection and diagnosis of a disease or disorder associated with aberrant expression of a polypeptide of interest in an animal, preferably a mammal and most preferably a human. A preferred embodiment of the invention is the detection and diagnosis of a disease or disorder of the endocrine system associated with aberrant expression of an endocrine antigen in an animal, preferably a mammal and most preferably a human. In one embodiment, diagnosis comprises: a) administering (for example, parenterally, subcutaneously, or intraperitoneally) to a subject an effective amount of a labeled molecule which specifically binds to the polypeptide of interest; b) waiting for a time interval following the administering for permitting the labeled molecule to preferentially concentrate at sites in the subject where the polypeptide is expressed (and for unbound labeled molecule to be cleared to background level); c) determining background level; and d) detecting the labeled molecule in the subject, such that detection of labeled molecule above the background level indicates that the subject has a particular disease or disorder associated with aberrant expression of the polypeptide of interest. Background level can be determined by various methods including, comparing the amount of labeled molecule detected to a standard value previously determined for a particular system.

[0348] It will be understood in the art that the size of the subject and the imaging system used will determine the quantity of imaging moiety needed to produce diagnostic images. In the case of a radioisotope moiety, for a human subject, the quantity of radioactivity injected will normally range from about 5 to 20 millicuries of 99 mTc. The labeled antibody or antibody fragment will then preferentially accumulate at the location of cells which contain the specific protein. In vivo tumor imaging is described in S. W. Burchiel et al., “Immunopharmacokinetics of Radiolabeled Antibodies and Their Fragments.” (Chapter 13 in Tumor Imaging: The Radiochemical Detection of Cancer, S. W. Burchiel and B. A. Rhodes, eds., Masson Publishing Inc. (1982)).

[0349] Depending on several variables, including the type of label used and the mode of administration, the time interval following the administration for permitting the labeled molecule to preferentially concentrate at sites in the subject and for unbound labeled molecule to be cleared to background level is 6 to 48 hours or 6 to 24 hours or 6 to 12 hours. In another. embodiment the time interval following administration is 5 to 20 days or 5 to 10 days.

[0350] In an embodiment, monitoring of the disease or disorder is carried out by repeating the method for diagnosing the disease or disorder, for example, one month after initial diagnosis, six months after initial diagnosis, one year after initial diagnosis, etc.

[0351] Presence of the labeled molecule can be detected in the patient using methods known in the art for in vivo scanning. These methods depend upon the type of label used. Skilled artisans will be able to determine the appropriate method for detecting a particular label. Methods and devices that may be used in the diagnostic methods of the invention include, but are not limited to, computed tomography (CT), whole body scan such as position emission tomography (PET), magnetic resonance imaging (MRI), and sonography.

[0352] In a specific embodiment, the molecule is labeled with a radioisotope and is detected in the patient using a radiation responsive surgical instrument (Thurston et al., U.S. Pat. No. 5,441,050). In another embodiment, the molecule is labeled with a fluorescent compound and is detected in the patient using a fluorescence responsive scanning instrument. In another embodiment, the molecule is labeled with a positron emitting metal and is detected in the patent using positron emission-tomography. In yet another embodiment, the molecule is labeled with a paramagnetic label and is detected in a patient using magnetic resonance imaging (MRI).

[0353] Kits

[0354] The present invention provides kits that can be used in the above methods. In one embodiment, a kit comprises an antibody of the invention, preferably a purified antibody, in one or more containers. In a specific embodiment, the kits of the present invention contain a substantially isolated polypeptide comprising an epitope which is specifically immunoreactive with an antibody included in the kit. Preferably, the kits of the present invention further comprise a control antibody which does not react with the polypeptide of interest. In another specific embodiment, the kits of the present invention contain a means for detecting the binding of an antibody to a polypeptide of interest (e.g., the antibody may be conjugated to a detectable substrate such as a fluorescent compound, an enzymatic substrate, a radioactive compound or a luminescent compound, or a second antibody which recognizes the first antibody may be conjugated to a detectable substrate).

[0355] In another specific embodiment of the present invention, the kit is a diagnostic kit for use in screening serum containing antibodies specific against proliferative and/or cancerous polynucleotides and polypeptides. Such a kit may include a control antibody that does not react with the polypeptide of interest. Such a kit may include a substantially isolated polypeptide antigen comprising an epitope which is specifically immunoreactive with at least one anti-polypeptide antigen antibody. Further, such a kit includes means for detecting the binding of said antibody to the antigen (e.g., the antibody may be conjugated to a fluorescent compound such as fluorescein or rhodamine which can be detected by flow cytometry). In specific embodiments, the kit may include a recombinantly produced or chemically synthesized polypeptide antigen. The polypeptide antigen of the kit may also be attached to a solid support.

[0356] In a more specific embodiment the detecting means of the above-described kit includes a solid support to which said polypeptide antigen is attached. Such a kit may also include a non-attached reporter-labeled anti-human antibody. In this embodiment, binding of the antibody to the polypeptide antigen can be detected by binding of the said reporter-labeled antibody.

[0357] In an additional embodiment, the invention includes a diagnostic kit for use in screening serum containing antigens of the polypeptide of the invention. The diagnostic kit includes a substantially isolated antibody specifically immunoreactive with polypeptide or polynucleotide antigens, and means for detecting the binding of the polynucleotide or polypeptide antigen to the antibody. In one embodiment, the antibody is attached to a solid support. In a specific embodiment, the antibody may be a monoclonal antibody. The detecting means of the kit may include a second, labeled monoclonal antibody. Alternatively, or in addition, the detecting means may include a labeled, competing antigen.

[0358] In one diagnostic configuration, test serum is reacted with a solid phase reagent having a surface-bound antigen obtained by the methods of the present invention. After binding with specific antigen antibody to the reagent and removing unbound serum components by washing, the reagent is reacted with reporter-labeled anti-human antibody to bind reporter to the reagent in proportion to the amount of bound anti-antigen antibody on the solid support. The reagent is again washed to remove unbound labeled antibody, and the amount of reporter associated with the reagent is determined. Typically, the reporter is an enzyme which is detected by incubating the solid phase in the presence of a suitable fluorometric, luminescent or calorimetric substrate (Sigma, St. Louis, Mo.).

[0359] The solid surface reagent in the above assay is prepared by known techniques for attaching protein material to solid support material, such as polymeric beads, dip sticks, 96-well plate or filter material. These attachment methods generally include non-specific adsorption of the protein to the support or covalent attachment of the protein, typically through a free amine group, to a chemically reactive group on the solid support, such as an activated carboxyl, hydroxyl, or aldehyde group. Alternatively, streptavidin coated plates can be used in conjunction with biotinylated antigen(s).

[0360] Thus, the invention provides an assay system or kit for carrying out this diagnostic-method. The kit generally includes a support with surface-bound recombinant antigens, and a reporter-labeled anti-human antibody for detecting surface-bound anti-antigen antibody.

[0361] Use of the Polynucleotides

[0362] Each of the polynucleotides identified herein can be used in numerous ways as reagents. The following description should be considered exemplary and utilizes known techniques.

[0363] The polynucleotides of the present invention are useful for chromosome identification. There exists an ongoing need to identify new chromosome markers, since few chromosome marking reagents, based on actual sequence data (repeat polymorphisms), are presently available. Each sequence is specifically targeted to and can hybridize with a particular location on an individual human chromosome, thus each polynucleotide of the present invention can routinely be used as a chromosome marker using techniques known in the art. Table 1A, column 8 provides the chromosome location of some of the polynucleotides of the invention.

[0364] Briefly, sequences can be mapped to chromosomes by preparing PCR primers (preferably at least 15 bp (e.g., 15-25 bp) from the sequences shown in SEQ ID NO:X. Primers can optionally be selected using, computer analysis so that primers do not span more than one predicted exon in the genomic DNA. These primers are then used for PCR screening of somatic cell hybrids containing individual human chromosomes. Only those hybrids containing the human gene corresponding to SEQ ID NO:X will yield an amplified fragment.

[0365] Similarly, somatic hybrids provide a rapid method of PCR mapping the polynucleotides to particular chromosomes. Three or more clones can be assigned per day using a single thermal cycler. Moreover, sublocalization of the polynucleotides can be achieved with panels of specific chromosome fragments. Other gene mapping strategies that can be used include in situ hybridization, prescreening with labeled flow-sorted chromosomes, preselection by hybridization to construct chromosome specific-cDNA libraries, and computer mapping techniques (See, e.g., Shuler, Trends Biotechnol 16:456-459 (1998) which is hereby incorporated by reference in its entirety).

[0366] Precise chromosomal location of the polynucleotides can also be achieved using fluorescence in situ hybridization (FISH) of a metaphase chromosomal spread. This technique uses polynucleotides as short as 500 or 600 bases; however, polynucleotides 2,000-4,000 bp are preferred. For a review of this technique, see Verma et al., “Human Chromosomes: a Manual of Basic Techniques,” Pergamon Press, New York (1988).

[0367] For chromosome mapping, the polynucleotides can be used individually (to mark a single chromosome or a single site on that chromosome) or in panels (for marking multiple sites and/or multiple chromosomes).

[0368] Thus, the present invention also provides a method for chromosomal localization which involves (a) preparing PCR primers from the polynucleotide sequences in Table 1A and/or Table 2 and SEQ ID NO:X and (b) screening somatic cell hybrids containing individual chromosomes.

[0369] The polynucleotides of the present invention. would likewise be useful for radiation hybrid mapping, HAPPY mapping, and long range restriction mapping. For a review of these techniques and others known in the art, see, e.g. Dear, “Genome Mapping: A Practical Approach,” IRL Press at Oxford University Press, London (1997); Aydin, J. Mol. Med. 77:691-694 (1999); Hacia et al., Mol. Psychiatry 3:483-492 (1998); Herrick et al., Chromosome Res. 7:409-423 (1999); Hamilton et al., Methods Cell Biol. 62:265-280 (2000); and/or Ott, J. Hered. 90:68-70 (1999), each of which is hereby incorporated by reference in its entirety.

[0370] Once a polynucleotide has been mapped to a precise chromosomal location, the physical position of the polynucleotide can be used in linkage analysis. Linkage analysis establishes coinheritance between a chromosomal location and presentation of a particular disease. (Disease mapping data are found, for example, in V. McKusick, Mendelian Inheritance in Man (available on line through Johns Hopkins University Welch Medical Library).) Column 9 of Table 1A provides an OMIM reference identification number of diseases associated with the cytologic band disclosed in column 8 of Table 1A, as determined using techniques described herein and by reference to Table 5. Assuming 1 megabase mapping resolution and one gene per 20 kb, a cDNA precisely localized to a chromosomal region associated with the disease could be one of 50-500 potential causative genes.

[0371] Thus, once coinheritance is established, differences in a polynucleotide of the invention and the corresponding gene between affected and unaffected individuals can be examined. First, visible structural alterations in the chromosomes, such as deletions or translocations, are examined in chromosome spreads or by PCR. If no structural alterations exist, the presence of point mutations are ascertained. Mutations observed in some or all affected individuals, but not in normal individuals, indicates that the mutation may cause the disease. However, complete sequencing of the polypeptide and the corresponding gene from several normal individuals is required to distinguish the mutation from a polymorphism. If a new polymorphism is identified, this polymorphic polypeptide can be used for further linkage analysis.

[0372] Furthermore, increased or decreased expression of the gene in affected individuals as compared to unaffected individuals can be assessed using the polynucleotides of the invention. Any of these alterations (altered expression, chromosomal rearrangement, or mutation) can be used as a diagnostic or prognostic marker. Diagnostic and prognostic methods, kits and reagents encompassed by the present invention are briefly described below and more thoroughly elsewhere herein (see e.g., the sections labeled “Antibodies”, “Diagnostic Assays”, and “Methods for Detecting Endocrine System Disease, Including Cancer”).

[0373] Thus, the invention also provides a diagnostic method useful during diagnosis of a disorder, involving measuring the expression level of polynucleotides of the present invention in cells or body fluid from an individual and comparing the measured gene expression level with a standard level of polynucleotide expression level, whereby an increase or decrease in the gene expression level compared to the standard is indicative of a disorder. Additional non-limiting examples of diagnostic methods encompassed by the present invention are more thoroughly described elsewhere herein (see, e.g., Example 12).

[0374] In still another embodiment, the invention includes a kit for analyzing samples for the presence of proliferative and/or cancerous polynucleotides derived from a test subject, as further described herein. In a general embodiment, the kit includes at least one polynucleotide probe containing a nucleotide sequence that will specifically hybridize with a polynucleotide of the invention and a suitable container. In a specific embodiment, the kit includes two polynucleotide probes defining an internal region of the polynucleotide of the invention, where each probe has one strand containing a 31′mer-end internal to the region. In a further embodiment, the probes may be useful as primers for polymerase chain reaction amplification.

[0375] Where a diagnosis of a related disorder, including, for example, diagnosis of a tumor, has already been made according to conventional methods, the present invention is useful as a prognostic indicator, whereby patients exhibiting enhanced or depressed polynucleotide of the invention expression will experience a worse clinical outcome relative to patients expressing the gene at a level nearer the standard level.

[0376] By “measuring the expression level of polynucleotides of the invention” is intended qualitatively or quantitatively measuring or estimating the level of the polypeptide of the invention or the level of the mRNA encoding the polypeptide of the invention in a first biological sample either directly (e.g., by determining or estimating absolute protein level or mRNA level) or relatively (e.g., by comparing to the polypeptide level or mRNA level in a second biological sample). Preferably, the polypeptide level or mRNA level in the first biological sample is measured or estimated and compared to a standard polypeptide level or mRNA level, the standard being taken from a second biological sample obtained from an individual not having the related disorder or being determined by averaging levels from a population of individuals not having a related disorder. As will be appreciated in the art, once a standard polypeptide level or mRNA level is known, it can be used repeatedly as a standard for comparison.

[0377] By “biological sample” is intended any biological sample obtained from an individual, body fluid, cell line, tissue culture, or other source which contains polypeptide of the present invention or the corresponding mRNA. As indicated, biological samples include body fluids (such as semen, lymph, vaginal pool, sera, plasma, urine, synovial fluid and spinal fluid) which contain the polypeptide of the present invention, and tissue sources found to express the polypeptide of the present invention. Methods for obtaining tissue biopsies and body fluids from mammals are well known in the art. Where the biological sample is to include mRNA, a tissue biopsy is the preferred source.

[0378] The method(s) provided above may preferably be applied in a diagnostic method and/or kits in which polynucleotides and/or polypeptides of the invention are attached to a solid support. In one exemplary method, the support may be a “gene chip” or a “biological chip” as described in U.S. Pat. Nos. 5,837,832, 5,874,219, and 5,856,174. Further, such a gene chip with polynucleotides of the invention attached may be used to identify polymorphisms between the isolated polynucleotide sequences of the invention, with polynucleotides isolated from a test subject. The knowledge of such polymorphisms (i.e., their location, as well as, their existence) would be beneficial in identifying disease loci for many disorders, such as for example, in neural disorders, immune system disorders, muscular disorders, reproductive disorders, gastrointestinal disorders, pulmonary disorders, digestive disorders, cardiovascular disorders, renal disorders, proliferative disorders, and/or cancerous diseases and conditions. Such a method is described in U.S. Pat. Nos. 5,858,659 and 5,856,104. The U.S. Patents referenced stipra are hereby incorporated by reference in their entirety herein.

[0379] The present invention encompasses polynucleotides of the present invention that ate chemically synthesized, or reproduced as peptide nucleic acids (PNA), or according to other methods known in the art. The use of PNAs would serve as the preferred form if the polynucleotides of the invention are incorporated onto a solid support, or gene chip. For the purposes of the present invention, a peptide nucleic acid (PNA) is a polyamide type of DNA analog and the monomeric units for adenine, guanine, thymine and cytosine are available commercially (Perceptive Biosystems). Certain components of DNA, such as phosphorus, phosphorus oxides, or deoxyribose derivatives, are not present in PNAs. As disclosed by Nielsen et al., Science 254:1497 (1991); and Egholm et al., Nature 365:666 (1993), PNAs bind specifically and tightly to complementary DNA strands and are not degraded by nucleases. In fact, PNA binds more strongly to DNA than DNA itself does. This is probably because there is no electrostatic repulsion between the two strands, and also the polyamide backbone is more flexible. Because of this, PNA/DNA duplexes bind under a wider range of stringency conditions than DNA/DNA duplexes, making it easier to perform multiplex hybridization. Smaller probes can be used than with DNA due to the strong binding. In addition, it is more likely that single base mismatches can be determined with PNA/DNA hybridization because a single mismatch in a PNA/DNA 15-mer lowers the melting point (T.sub.m) by 8°-20° C., vs. 4°-16° C. for the DNA/DNA 15-mer duplex. Also, the absence of charge groups in PNA means that hybridization can be done at low ionic strengths and reduce possible interference by salt during the analysis.

[0380] The compounds of the present invention have uses which include, but are not limited to, detecting cancer in mammals. In particular the invention is useful during diagnosis of pathological cell proliferative neoplasias which include, but are not limited to: acute myelogenous leukemias including acute monocytic leukemia, acute myeloblastic leukemia, acute promyelocytic leukemia, acute myelomonocytic leukemia, acute erythroleukemia, acute megakaryocytic leukemia, and acute undifferentiated leukemia, etc.; and chronic myelogenous leukemias including chronic myelomonocytic leukemia, chronic granulocytic leukemia, etc. Preferred mammals include monkeys, apes, cats, dogs, cows, pigs, horses, rabbits and humans. Particularly preferred are humans.

[0381] The compounds of the present invention have preferred uses which include, but are not limited to, detecting cancer of an endocrine system tissue in mammals. In particular the invention is useful during diagnosis of pathological cell proliferative neoplasias which include, but are not limited to: neoplasias of the testis and neo-testis, human thyroid carcinoma, Hurthle cell tumours of the thyroid, thyroid carcinoma, medullary thyroid carcinoma, pituitary adenoma, ovarian cancer, adrenocortical carcinoma, and islet cell tumor syndrome. Preferred mammals include monkeys, apes, cats, dogs, cows, pigs, horses, rabbits and humans. Particularly preferred are humans.

[0382] Pathological cell proliferative disorders are often associated with inappropriate activation of proto-oncogenes. (Gelmann, E. P. et al., “The Etiology of Acute Leukemia: Molecular Genetics and Viral Oncology,” in Neoplastic Diseases of the Blood, Vol 1., Wiemik, P. H. et al. eds., 161-182 (1985)). Neoplasias are now believed to result from the qualitative alteration of a normal cellular gene product, or from the quantitative modification of gene expression by insertion into the chromosome of a viral sequence, by chromosomal translocation of a gene to a more actively transcribed region, or by some other mechanism. (Gelmann et al., supra) It is likely that mutated or altered expression of specific genes is involved in the pathogenesis of some leukemias, among other tissues and cell types. (Gelmann et al., supra) Indeed, the human counterparts of the oncogenes involved in some animal neoplasias have been amplified or translocated in some cases of human leukemia and carcinoma. (Gelmann et al., supra)

[0383] For example, c-myc expression is highly amplified in the non-lymphocytic leukemia cell line HL-60. When HL-60 cells are chemically induced to stop proliferation, the level of c-myc is found to be downregulated. (International Publication Number WO 91/15580). However, it has been shown that exposure of HL-60 cells to a DNA construct that is complementary to the 5′ end of c-myc or c-myb blocks translation of the corresponding mRNAs which downregulates expression of the c-myc or c-myb proteins and causes arrest of cell proliferation and differentiation of the treated cells. (International Publication Number WO 91/15580; Wickstrom et al., Proc. Natl. Acad. Sci. 85:1028 (1988); Anfossi et al., Proc. Natl. Acad. Sci. 86:3379 (1989)). However, the skilled artisan would appreciate the present invention's usefulness is not be limited to treatment, prevention, diagnosis and/or prognosis, of proliferative disorders of cells and tissues of hematopoietic origin, in light of the numerous cells and cell types of varying origins which are known to exhibit proliferative phenotypes. In preferred embodiments, the compounds and/or methods of the invention are used to treat, prevent, diagnose, and/or prognose, proliferative disorders of endocrine system cells and tissues.

[0384] In addition to the foregoing, a polynucleotide of the present invention can be used to control gene expression through triple helix formation or through antisense DNA or RNA. Antisense techniques are discussed, for example, in Okano, J. Neurochem. 56: 560 (1991); “Oligodeoxynucleotides as Antisense Inhibitors of Gene Expression, CRC Press, Boca Raton, Fla. (1988). Triple helix formation is discussed in, for instance Lee et al., Nucleic Acids Research 6: 3073 (1979); Cooney et al., Science 241: 456 (1988); and Dervan et al., Science 251: 1360 (1991). Both methods rely on binding of the polynucleotide to a complementary DNA or RNA. For these techniques, preferred polynucleotides are usually oligonucleotides 20 to 40 bases in length and complementary to either the region of the gene involved in transcription (triple helix—see Lee et al., Nucl. Acids Res. 6:3073 (1979); Cooney et al., Science 241:456 (1988); and Dervan et al., Science 251:1360 (1991)) or to the mRNA itself (antisense—Okano, J. Neurochem. 56:560 (1991); Oligodeoxy-nucleotides as Antisense Inhibitors of Gene Expression, CRC Press, Boca Raton, Fla. (1988).) Triple helix formation optimally results in a shut-off of RNA transcription from DNA, while antisense RNA hybridization blocks translation of an mRNA molecule into polypeptide. The oligonucleotide described above can also be delivered to cells such that the antisense RNA or DNA may be expressed in vivo to inhibit production of polypeptide of the present invention antigens. Both techniques are effective in model systems, and the information disclosed herein can be used to design antisense or triple helix polynucleotides in an effort to treat disease, and in particular, for the treatment of proliferative diseases and/or conditions. Non-limiting antisense and triple helix methods encompassed by the present invention are more thoroughly described elsewhere herein (see, e.g., the section labeled “Antisense and Ribozyme (Antagonists)”).

[0385] Polynucleotides of the present invention are also useful in gene therapy. One goal of gene therapy is to insert a normal gene into an organism having a defective gene, in an effort to correct the genetic defect. The polynucleotides disclosed in the present invention offer a means of targeting such genetic defects in a highly accurate manner. Another goal is to insert a new gene that was not present in the host genome, thereby producing a new trait in the host cell. Additional non-limiting examples of gene therapy methods encompassed by the present invention are more thoroughly described elsewhere herein (see, e.g., the sections labeled “Gene Therapy Methods” and Examples 16, 17 and 18).

[0386] The polynucleotides are also useful for identifying individuals from minute biological samples. The United States military, for example, is considering the use of restriction fragment length polymorphism (RFLP) for identification of its personnel. In this technique, an individual's genomic DNA is digested with one or more restriction enzymes, and probed on a Southern blot to yield unique bands for identifying personnel. This method does not suffer from the current limitations of “Dog Tags” which can be lost, switched, or stolen, making positive identification difficult. The polynucleotides of the present invention can be used as additional DNA markers for RFLP.

[0387] The polynucleotides of the present invention can also be used as an alternative to RFLP, by determining the actual base-by-base DNA sequence of selected portions of an individual's genome. These sequences can be used to prepare PCR primers for amplifying and isolating such selected DNA, which can then be sequenced. Using this technique, individuals can be identified because each individual will have a unique set of DNA sequences. Once an unique ID database is established for an individual, positive identification of that individual, living or dead, can be made from extremely small tissue samples.

[0388] Forensic biology also benefits from using DNA-based identification techniques as disclosed herein. DNA sequences taken from very small biological samples such as tissues, e.g., hair or skin, or body fluids, e.g., blood, saliva, semen, synovial fluid, amniotic fluid, breast milk, lymph, pulmonary sputum or surfactant, urine, fecal matter, etc., can be amplified using PCR. In one prior art technique, gene sequences amplified from polymorphic loci, such as DQa class II HLA gene, are used in forensic biology to identify individuals. (Erlich, H., PCR Technology, Freeman and Co. (1992).) Once these specific polymorphic loci are amplified, they are digested with one or more restriction enzymes, yielding an identifying set of bands on a Southern blot probed with DNA corresponding to the DQa class II HLA gene. Similarly, polynucleotides of the present invention can be used as polymorphic markers for forensic purposes.

[0389] There is also a need for reagents capable of identifying the source of a particular tissue. Such need arises, for example, in forensics when presented with tissue of unknown origin. Appropriate reagents can comprise, for example, DNA probes or primers prepared from the sequences of the present invention, specific to tissues, including but not limited to, those sequences referred to in Table 1A. Panels of such reagents can identify tissue by species and/or by organ type. In a similar fashion, these reagents can be used to screen tissue cultures for contamination. Additional non-limiting examples of such uses are further described herein.

[0390] Because endocrine antigens are found expressed in tissues of the endocrine system, the polynucleotides of the present invention are also useful as hybridization probes for differential identification of the tissue(s) or cell type(s) present in a biological sample. Similarly, polypeptides and antibodies directed to polypeptides of the present invention are useful to provide immunological probes for differential identification of the tissue(s) (e.g., immunohistochemistry assays) or cell type(s) (e.g., immunocytochemistry assays). In a specific embodiment, the polynucleotides of the present invention are also useful as hybridization probes for differential identification of endocrine system tissue(s) or cell type(s) present in a biological sample. Similarly, polypeptides and antibodies directed to polypeptides of the present invention are useful to provide immunological probes for differential identification of endocrine tissue(s) (e.g., immunohistochemistry assays) or cell type(s) (e.g., immunocytochemistry assays). In addition, for a number of disorders of the above tissues or cells, significantly higher or lower levels of gene expression of the polynucleotides/polypeptides of the present invention may be detected in certain tissues (e.g., tissues expressing polypeptides and/or polynucleotides of the present invention, for example, normal endocrine tissues or diseased endocrine tissues, and/or those tissues/cells corresponding to the library source relating to a polynucleotide sequence of the invention as disclosed in column 7 of Table 1A, and/or cancerous and/or wounded tissues) or bodily fluids (e.g., semen, lymph, vaginal pool, serum, plasma, urine, synovial fluid or spinal fluid) taken from an individual having such a disorder, relative to a “standard” gene expression level, i.e., the expression level in healthy tissue from an individual not having the disorder.

[0391] Thus, the invention provides a diagnostic method of a disorder, which involves: (a) assaying gene expression level in cells or body fluid of an individual; (b) comparing the gene expression level with a standard gene expression level, whereby an increase or decrease in the assayed gene expression level compared to the standard expression level is indicative of a disorder.

[0392] In the very least, the polynucleotides of the present invention can be used as molecular weight markers on Southern gels, as diagnostic probes for the presence of a specific mRNA in a particular cell type, as a probe to “subtract-out” known sequences in the process of discovering novel polynucleotides, for selecting and making oligomers for attachment to a “gene chip” or other support, to raise anti-DNA antibodies using DNA immunization techniques, and as an antigen to elicit an immune response.

[0393] Uses of the Polypeptides

[0394] Each of the polypeptides identified herein can be used in numerous ways. The following description should be considered exemplary and utilizes known techniques.

[0395] Polypeptides and antibodies directed to polypeptides of the present invention are useful to provide immunological probes for differential identification of the tissue(s) (e.g., immunohistochemistry assays such as, for example, ABC immunoperoxidase (Hsu et al., J. Histochem. Cytochem. 29:577-580 (1981)) or cell type(s) (e.g., immunocytochemistry assays).

[0396] Antibodies can be used to assay levels of polypeptides encoded by polynucleotides of the invention in a biological sample using classical immunohistological methods known to those of skill in the art (see, e.g., Jalkanen, et al., J. Cell. Biol. 101:976-985 (1985); Jalkanen, et al., J. Cell. Biol. 105:3087-3096 (1987)). Other antibody-based methods useful for detecting protein gene expression include immunoassays, such as the enzyme linked immunosorbent assay (ELISA) and the radioimmunoassay (RIA). Suitable antibody assay labels are known in the art and include enzyme labels, such as, glucose oxidase; radioisotopes, such as iodine (¹³¹I, ¹²⁵I, ¹²³I, ¹²¹I), carbon (¹⁴C), sulfur (³⁵S), tritium (³H), indium (^{115m}In, ^{113m}In, ¹¹²In, ¹¹¹In), and technetium (⁹⁹Tc, ^{99m}Tc), thallium (²⁰¹Ti), gallium (⁶⁸Ga, ⁶⁷Ga), palladium (¹⁰³Pd), molybdenum (⁹⁹Mo), xenon (¹³³Xe), fluorine (¹⁸F), ¹⁵³ μm, ¹⁷⁷Lu, ¹⁵⁹Gd, ¹⁴⁹Pm, ¹⁴⁰La, ¹⁷⁵Yb, ¹⁶⁶Ho, ⁹⁰y, ⁴⁷Sc, ¹⁸⁶Re, ¹⁸⁸Re, ¹⁴²Pr, ¹⁰⁵Rh, ⁹⁷Ru; luminescent labels, such as luminol; and fluorescent labels, such as fluorescein and rhodamine, and biotin.

[0397] In addition to assaying levels of polypeptide of the present invention in a biological sample, proteins can also be detected in vivo by imaging. Antibody labels or markers for in vivo imaging of protein include those detectable by X-radiography, NMR or ESR. For X-radiography, suitable labels include radioisotopes such as barium or cesium, which emit detectable radiation but are not overtly harmful to the subject. Suitable markers for NMR and ESR include those with a detectable characteristic spin, such as deuterium, which may be incorporated into the antibody by labeling of nutrients for the relevant hybridoma.

[0398] An endocrine antigen-specific antibody or antibody fragment which has been labeled with an appropriate detectable imaging moiety, such as a radioisotope (for example, ¹³¹I, ¹¹²In, ^{99m}Tc, (¹³¹I, ¹²⁵I, ¹²³I, ¹²¹I), carbon (¹⁴C), sulfur (³⁵S), tritium (³H), indium (^{115m}In, ^{113m}In, ¹¹²In, ¹¹¹In), and technetium (⁹⁹Tc, ^{99m}Tc), thallium (201Ti), gallium (⁶⁸Ga, ⁶⁷Ga), palladium (¹⁰³Pd), molybdenum (⁹⁹Mo), xenon (¹³³Xe), fluorine (¹⁸F, ¹⁵³Sm, ¹⁷⁷Lu, ¹⁵⁹Gd, ¹⁴⁹Pm, ¹⁴⁰La, ¹⁷⁵Yb, ¹⁶⁶Ho, ⁹⁰Y, ⁴⁷Sc, ¹⁸⁶Re, ¹⁸⁸Re, ¹⁴²Pr, ¹⁰⁵Rh, ⁹⁷Ru), a radio-opaque substance, or a material detectable by nuclear magnetic resonance, is introduced (for example, parenterally, subcutaneously or intraperitoneally) into the mammal to be examined for an endocrine system disorder. It will be understood in the art that the size of the subject and the imaging system used will determine the quantity of imaging moiety needed to produce diagnostic images. In the case of a radioisotope moiety, for a human subject, the quantity of radioactivity injected will normally range from about 5 to 20 millicuries of ^{99m}Tc. The labeled antibody or antibody fragment will then preferentially accumulate at the location of cells which express the polypeptide encoded by a polynucleotide of the invention. In vivo tumor imaging is described in S. W. Burchiel et al., “Immunopharmacokinetics of Radiolabeled Antibodies and Their Fragments” (Chapter 13 in Tumor Imaging: The Radiochemical Detection of Cancer, S. W. Burchiel and B. A. Rhodes, eds., Masson Publishing Inc. (1982)).

[0399] In one embodiment, the invention provides a method for the specific delivery of compositions of the invention to cells by administering polypeptides of the invention (e.g., polypeptides encoded by polynucleotides of the invention and/or antibodies) that are associated with heterologous polypeptides or nucleic acids. In one example, the invention provides a method for delivering a therapeutic protein into the targeted cell. In another example, the invention provides a method for delivering a single stranded nucleic acid (e.g., antisense or ribozymes) or double stranded nucleic acid (e.g., DNA that can integrate into the cell's genome or replicate episomally and that can be transcribed) into the targeted cell.

[0400] In another embodiment, the invention provides a method for the specific destruction of cells (e.g., the destruction of tumor cells) by administering polypeptides of the invention in association with toxins or cytotoxic prodrugs.

[0401] In a preferred embodiment, the invention provides a method for the specific destruction of endocrine system tissues (e.g., aberrant endocrine system cells, endocrine system neoplasms) by administering polypeptides of the invention (e.g., polypeptides encoded by polynucleotides of the invention and/or antibodies) in association with toxins or cytotoxic prodrugs. In another preferred embodiment the invention provides a method for the specific destruction of tissues/cells corresponding to the library source relating to a polynucleotide sequence of the invention as disclosed in column 7 of Table 1A by administering polypeptides of the invention in association with toxins or cytotoxic prodrugs.

[0402] By “toxin” is meant one or more compounds that bind and activate endogenous cytotoxic effector systems, radioisotopes, holotoxins, modified toxins, catalytic subunits of toxins, or any molecules or enzymes not normally present in or on the surface of a cell that under defined conditions cause the cell's death. Toxins that may be used according to the methods of the invention include, but are not limited to, radioisotopes known in the art, compounds such as, for example, antibodies (or complement fixing containing portions thereof) that bind an inherent or induced endogenous cytotoxic effector system, thymidine kinase, endonuclease, RNAse, alpha toxin, ricin, abrin, Pseudomonas exotoxin A, diphtheria toxin, saporin, momordin, gelonin, pokeweed antiviral protein, alpha-sarcin and cholera toxin. “Toxin” also includes a cytostatic or cytocidal agent, a therapeutic agent or a radioactive metal ion, e.g., alpha-emitters such as, for example, ²¹³Bi, or other radioisotopes such as, for example, ¹⁰³Pd, ¹³³Xe, ¹³¹I, ¹¹¹In, ⁶⁸Ge, ⁵⁷Co, ⁶⁵Zn, ⁸⁵Sr, ³²P, ³⁵S, ⁹⁰Y, ¹⁵³Sm, ¹⁵³Gd, ¹⁶⁹Yb, ⁵¹Cr, ⁵⁴Mn, ⁷⁵Se, ¹¹³Sn, ⁹⁰Yttrium, ¹¹⁷Tin, ¹⁸⁶Rhenium, ¹⁶⁶Holmium, and ¹⁸⁸Rhenium; luminescent labels, such as luminol; and fluorescent labels, such as fluorescein and rhodamine, and biotin.

[0403] In a specific embodiment, the invention provides a method for the specific destruction of cells (e.g., the destruction of tumor cells) by administering polypeptides of the invention or antibodies of the invention in association with the radioisotope ⁹⁰Y. In another specific embodiment, the invention provides a method for the specific destruction of cells (e.g., the destruction of tumor cells) by administering polypeptides of the invention or antibodies of the invention in association with the radioisotope ¹¹¹In. In a further specific embodiment, the invention provides a method for the specific destruction of cells (e.g., the destruction of tumor cells) by administering polypeptides of the invention or antibodies of the invention in association with the radioisotope ¹³¹I.

[0404] Techniques known in the art may be applied to label polypeptides of the invention (including antibodies). Such techniques include, but are not limited to, the use of bifunctional conjugating agents (see e.g., U.S. Pat. Nos. 5,756,065; 5,714,631; 5,696,239; 5,652,361; 5,505,931; 5,489,425; 5,435,990; 5,428,139; 5,342,604; 5,274,119; 4,994,560; and 5,808,003; the contents of each of which are hereby incorporated by reference in its entirety).

[0405] Thus, the invention provides a diagnostic method of a disorder, which involves (a) assaying the expression level of a polypeptide of the present invention in cells or body fluid of an individual; and (b) comparing the assayed polypeptide expression level with a standard polypeptide expression level, whereby an increase or decrease in the assayed polypeptide expression level compared to the standard expression level is indicative of a disorder. With respect to cancer, the presence of a relatively high amount of transcript in biopsied tissue from an individual may indicate a predisposition for the development of the disease, or may provide a means for detecting the disease prior to the appearance of actual clinical symptoms. A more definitive diagnosis of this type may allow health professionals to employ preventative measures or aggressive treatment earlier thereby preventing the development or further progression of the cancer.

[0406] Moreover, polypeptides of the present invention can be used to treat, detect, diagnose, and/or prevent diseases or conditions of the endocrine system such as, for example, Addison's disease, Cushing's syndrome, Thyrotoxicosis, Graves' disease, gigantism, pheochromocytoma, neuroblastoma, Berardinelli-Seip Congenital Lipodystrophy, Carney complex, Schmidt syndrome, precocious puberty, Borjeson-Forssman-Lehmann syndrome, Von Hippel-Lindau syndrome, Johanson-Blizzard syndrome, multiple endocrine neoplasia autoimmune polyendocrinopathy syndrome, Beckwith-Wiedemann syndrome, hyponatremia, cyclical mastalgia, invasive thymoma, toxic multinodular goitre, androgen-insensitivity syndrome, sertoli cell tumors, sex cord-stromal tumors, thyrotropin deficiency, Pendred syndrome, Thyrocerebroretinal syndrome, macrosomia adiposa congenita, adrenomyodystrophy, chromogranin, Retinohepatoendocrinologic syndrome, aniridia, adrenoleukodystrophy, Werner syndrome, Patterson pseudoleprechaunism syndrome, Rhyns syndrome, Bardet-Biedl syndrome, Reifenstein syndrome, chronic-adrenocortical insufficiency and disorders and/or cancers of endocrine tissues, including but not limited to, pancreas (e.g., congenital pancreatic agenesis, diabetes mellitus, diabetes insipidis, pheochromocytoma—islet cell tumor syndrome, nesidioblastosis of pancreas, islet cell adenomatosis); adrenal cortex (e.g., adrenoleukodystrophy, adrenal hypoplasia, adrenocortical carcinoma); ovary (e.g., ovarian cancer, polycystic ovary syndrome); pituitary (e.g., hyper-, hypopituitarism, pituitary dwarfism, pituitary adenoma, panhypopituitarism, thyrotropin deficiency, pituitary cretinism, McCune-Albright syndrome, acromegaly, Albright hereditary osteodystrophy, Kallmann syndrome); thyroid (e.g., hyper-, hypothyroidism, thyroid hormone coupling defect, thymic aplasia, human thyroid carcinoma, Hurthle cell tumours of the thyroid, thyroid carcinoma, medullary thyroid carcinoma, myxedema and cretinism, congenital hypothyroidism); parathyroid (e.g., hyper-, hypoparathyroidism, hyperparathyroidism); hypothallamus; and testes (e.g., capillary haemangioma of the testis (benign), neoplasias of the testis and neo-testis, testicular regression syndrome) and/or as described under “Endocrine Disorders,” “Reproductive Disorders” and/or “Gastrointestinal Disorders” below. In preferred embodiments, polynucleotides expressed in a particular tissue type (see, e.g., Table 1A, column 7) are used to diagnose, detect, prevent, treat and/or prognose disorders associated with the tissue type. For example, patients can be administered a polypeptide of the present invention in an effort to replace absent or decreased levels of the polypeptide (e.g., insulin), to supplement absent or decreased levels of a different polypeptide (e.g., hemoglobin S for hemoglobin B, SOD, catalase, DNA repair proteins), to inhibit the activity of a polypeptide (e.g., an oncogene or tumor supressor), to activate the activity of a polypeptide (e.g., by binding to a receptor), to reduce the activity of a membrane bound receptor by competing with it for free ligand (e.g., soluble TNF receptors used in reducing inflammation), or to bring about a desired response (e.g., blood vessel growth inhibition, enhancement of the immune response to proliferative cells or tissues).

[0407] Similarly, antibodies directed to a polypeptide of the present invention can also be used to treat disease (as described supra, and elsewhere herein). For example, administration of an antibody directed to a polypeptide of the present invention can bind, and/or neutralize the polypeptide, and/or reduce overproduction of the polypeptide. Similarly, administration of an antibody can activate the polypeptide, such as by binding to a polypeptide bound to a membrane (receptor).

[0408] At the very least, the polypeptides of the present invention can be used as molecular weight markers on SDS-PAGE gels or on molecular sieve gel filtration columns using methods well known to those of skill in the art. Polypeptides can also be used to raise antibodies, which in turn are used to measure protein expression from a recombinant cell, as a way of assessing transformation of the host cell. Moreover, the polypeptides of the present invention can be used to test the biological activities described herein.

[0409] Diagnostic Assays

[0410] The compounds of the present invention are useful for diagnosis, treatment, prevention and/or prognosis of various endocrine system related disorders in mammals, preferably humans. Such disorders include, but are not limited to, Addison's disease, Cushing's syndrome, Thyrotoxicosis, Graves' disease, gigantism, pheochromocytoma, neuroblastoma, Berardinelli-Seip Congenital Lipodystrophy, Carney complex, Schmidt syndrome, precocious puberty, Borjeson-Forssman-Lehmann syndrome, Von Hippel-Lindau syndrome, Johanson-Blizzard syndrome, multiple endocrine neoplasia autoimmune polyendocrinopathy syndrome, Beckwith-Wiedemann syndrome, hyponatremia, cyclical mastalgia, invasive thymoma, toxic multinodular goitre, androgen-insensitivity syndrome, sertoli cell tumors, sex cord-stromal tumors, thyrotropin deficiency, Pendred syndrome, Thyrocerebroretinal syndrome, macrosomia adiposa congenita, adrenomyodystrophy, chromogranin, Retinohepatoendocrinologic syndrome, aniridia, adrenoleukodystrophy, Werner syndrome, Patterson pseudoleprechaunism syndrome, Rhyns syndrome, Bardet-Biedl syndrome, Reifenstein syndrome, chronic adrenocortical insufficiency and disorders and/or cancers of endocrine tissues, including but not limited to, pancreas (e.g., congenital pancreatic agenesis, diabetes mellitus, diabetes insipidis, pheochromocytoma—islet cell tumor syndrome, nesidioblastosis of pancreas, islet cell adenomatosis); adrenal cortex (e.g., adrenoleukodystrophy, adrenal hypoplasia, adrenocortical carcinoma); ovary (e.g., ovarian cancer, polycystic ovary syndrome); pituitary (e.g., hyper-, hypopituitarism, pituitary dwarfism, pituitary adenoma, panhypopituitarism, thyrotropin deficiency, pituitary cretinism, McCune-Albright syndrome, acromegaly, Albright hereditary osteodystrophy, Kallmann syndrome); thyroid (e.g., hyper-, hypothyroidism, thyroid hormone coupling defect, thymic aplasia, human thyroid carcinoma, Hurthle cell tumours of the thyroid, thyroid carcinoma, medullary thyroid carcinoma, myxedema and cretinism, congenital hypothyroidism); parathyroid (e.g., hyper-, hypoparathyroidism, hyperparathyroidism); hypothallamus; and testes (e.g., capillary haemangioma of the testis (benign), neoplasias of the testis and neo-testis, testicular regression syndrome) and/or as described under “Endocrine Disorders,” “Reproductive Disorders” and/or “Gastrointestinal Disorders” below. In preferred embodiments, polynucleotides expressed in a particular tissue type (see, e.g., Table 1A, column 7) are used to diagnose, detect, prevent, treat and/or prognose disorders associated with the tissue type.

[0411] Endocrine antigens are expressed in endocrine system tissues. For a number of endocrine-related disorders, substantially altered (increased or decreased) levels of endocrine antigen gene expression can be detected in endocrine system tissue or other cells or bodily fluids (e.g., sera, plasma, urine, semen, synovial fluid or spinal fluid) taken from an individual having such a disorder, relative to a “standard” endocrine antigen gene expression level, that is, the endocrine antigen expression level in endocrine system tissues or bodily fluids from an individual not having the endocrine disorder. Thus, the invention provides a diagnostic method useful during diagnosis of an endocrine system disorder, which involves measuring the expression level of the gene encoding the endocrine associated polypeptide in endocrine tissue or other cells or body fluid from an individual and comparing the measured gene expression level with a standard endocrine antigen gene expression level, whereby an increase or decrease in the gene expression level(s) compared to the standard is indicative of an endocrine system disorder.

[0412] In specific embodiments, the invention provides a diagnostic method useful during diagnosis of a disorder of a normal or diseased tissue/cell source corresponding to column 7 of Table 1A, which involves measuring the expression level of the coding sequence of a polynucleotide sequence associated with this tissue/cell source as disclosed in Table 1A in the tissue/cell source or other cells or body fluid from an individual and comparing the expression level of the coding sequence with a standard expression level of the coding sequence of a polynucleotide sequence, whereby an increase or decrease in the gene expression level(s) compared to the standard is indicative of a disorder of a normal or diseased tissue/cell source corresponding to column 7 of Table 1A.

[0413] In particular, it is believed that certain tissues in mammals with cancer of cells or tissue of the endocrine system express significantly enhanced or reduced levels of normal or altered endocrine antigen expression and mRNA encoding the endocrine associated polypeptide when compared to a corresponding “standard” level. Further, it is believed that enhanced or depressed levels of the endocrine associated polypeptide can be detected in certain body fluids (e.g., sera, plasma, urine, and spinal fluid) or cells or tissue from mammals with such a cancer when compared to sera from mammals of the same species not having the cancer.

[0414] For example, as disclosed herein, endocrine associated polypeptides of the invention are expressed in endocrine system tissues. Accordingly, polynucleotides of the invention (e.g., polynucleotide sequences complementary to all or a portion of an endocrine antigen mRNA nucleotide sequence of SEQ ID NO:X, nucleotide sequence encoding SEQ ID NO:Y, nucleotide sequence encoding a polypeptide encoded by SEQ ID NO:X and/or a nucleotide sequence delineated by columns 8 and 9 of Table 2) and antibodies (and antibody fragments) directed against the polypeptides of the invention may be used to quantitate or qualitate concentrations of cells of the endocrine system expressing endocrine antigens, preferrably on their cell surfaces. These polynucleotides and antibodies additionally have diagnostic applications in detecting abnormalities in the level of endocrine antigens gene expression, or abnormalities in the structure and/or temporal, tissue, cellular, or subcellular location of endocrine antigens. These diagnostic assays may be performed in vivo or in vitro, such as, for example, on blood samples, biopsy tissue or autopsy tissue. In specific embodiments, polynucleotides and antibodies of the invention are used to quantitate or qualitate tissues/cells corresponding to the library source disclosed in column 7 of Table 1A expressing the corresponding endocrine sequence disclosed in the same row of Table 1A, preferrably on their cell surface.

[0415] Thus, the invention provides a diagnostic method useful during diagnosis of an endocrine disorder, including cancers, which involves measuring the expression level of the gene encoding the endocrine antigen polypeptide in endocrine system tissue or other cells or body fluid from an individual and comparing the measured gene expression level with a standard endocrine antigen gene expression level, whereby an increase or decrease in the gene expression level compared to the standard is indicative of an endocrine system disorder. In specific embodiments, polynucleotides and antibodies of the invention are used to quantitate or qualitate tissues/cells corresponding to the library source disclosed in column 7 of Table 1A expressing the corresponding endocrine sequence disclosed in the same row of Table 1A, preferrably on their cell surface.

[0416] Where a diagnosis of a disorder in the endocrine system, including diagnosis of a tumor, has already been made according to conventional methods, the present invention is useful as a prognostic indicator, whereby patients exhibiting enhanced or depressed endocrine antigen gene expression will experience a worse clinical outcome relative to patients expressing the gene at a level nearer the standard level.

[0417] By “assaying the expression level of the gene encoding the endocrine associated polypeptide” is intended qualitatively or quantitatively measuring or estimating the level of the endocrine antigen polypeptide or the level of the mRNA encoding the endocrine antigen polypeptide in a first biological sample either directly (e.g., by determining or estimating absolute protein level or mRNA level) or relatively (e.g., by comparing to the endocrine associated polypeptide level or mRNA level in a second biological sample). Preferably, the endocrine antigen polypeptide expression level or mRNA level in the first biological sample is measured or estimated and compared to a standard endocrine antigen polypeptide level or mRNA level, the standard being taken from a second biological sample obtained from an individual not having the disorder or being determined by averaging levels from a population of individuals not having a disorder of the endocrine system. As will be appreciated in the art, once a standard endocrine antigen polypeptide level or mRNA level is known, it can be used repeatedly as a standard for comparison.

[0418] By “biological sample” is intended any biological sample obtained from an individual, cell line, tissue culture, or other source containing endocrine antigen polypeptides (including portions thereof) or mRNA. As indicated, biological samples include body fluids (such as sera, plasma, urine, synovial fluid and spinal fluid) which contain cells expressing endocrine antigen polypeptides, endocrine system tissue, and other tissue sources found to express the full length or fragments thereof of an endocrine antigen. Methods for obtaining tissue biopsies and body fluids from mammals are well known in the art. Where the biological sample is to include mRNA, a tissue biopsy is the preferred source.

[0419] Total cellular RNA can be isolated from a biological sample using any suitable technique such as the single-step guanidinium-thiocyanate-phenol-chloroform method described in Chomczynski and Sacchi, Anal. Biochem. 162:156-159 (1987). Levels of mRNA encoding the endocrine antigen polypeptides are then assayed using any appropriate method. These include Northern blot analysis, S1 nuclease mapping, the polymerase chain reaction (PCR), reverse transcription in combination with the polymerase chain reaction (RT-PCR), and reverse transcription in combination with the ligase chain reaction (RT-LCR).

[0420] The present invention also relates to diagnostic assays such as quantitative and diagnostic assays for detecting levels of endocrine antigen polypeptides, in a biological sample (e.g., cells and tissues), including determination of normal and abnormal levels of polypeptides. Thus, for instance, a diagnostic assay in accordance with the invention for detecting over-expression of endocrine antigens compared to normal control tissue samples may be used to detect the presence of tumors. Assay techniques that can be used to determine levels of a polypeptide, such as an endocrine antigen polypeptide of the present invention in a sample derived from a host are well-known to those of skill in the art. Such assay methods include radioimmunoassays, competitive-binding assays, Western Blot analysis and ELISA assays. Assaying endocrine antigen polypeptide levels in a biological sample can occur using any art-known method.

[0421] Assaying endocrine antigen polypeptide levels in a biological sample can occur using antibody-based techniques. For example, endocrine antigen polypeptide expression in tissues can be studied with classical immunohistological methods (Jalkanen et al., J. Cell. Biol. 101:976-985 (1985); Jalkanen, M., et al., J. Cell. Biol. 105:3087-3096 (1987)). Other antibody-based methods useful for detecting endocrine antigen polypeptide gene expression include immunoassays, such as the enzyme linked immunosorbent assay (ELISA) and the radioimmunoassay (RIA). Suitable antibody assay labels are known in the art and include enzyme labels, such as, glucose oxidase, and radioisotopes, such as iodine (¹²⁵I, ¹²¹I), carbon (¹⁴C), sulfur (³⁵S), tritium (³H), indium (¹¹²In), and technetium (^{99m}Tc), and fluorescent labels, such as fluorescein and rhodamine, and biotin.

[0422] The tissue or cell type to be analyzed will generally include those which are known, or suspected, to express the endocrine antigen gene (such as, for example, cells of the endocrine system or cancers of endocrine system tissues). The protein isolation methods employed herein may, for example, be such as those described in Harlow and Lane (Harlow, E. and Lane, D., 1988, “Antibodies: A Laboratory Manual”, Cold Spring Harbor Laboratory Press, Cold Spring Harbor, N.Y.), which is incorporated herein by reference in its entirety. The isolated cells can be derived from cell culture or from a patient. The analysis of cells taken from culture may be a necessary step in the assessment of cells that could be used as part of a cell-based gene therapy technique or, alternatively, to test the effect of compounds on the expression of the endocrine antigen gene.

[0423] For example, antibodies, or fragments of antibodies, such as those described herein, may be used to quantitatively or qualitatively detect the presence of endocrine antigen gene products or conserved variants or peptide fragments thereof This can be accomplished, for example, by immunofluorescence techniques employing a fluorescently labeled antibody coupled with light microscopic, flow cytometric, or fluorimetric detection.

[0424] In a preferred embodiment, antibodies, or fragments of antibodies directed to any one or all of the predicted epitope domains of the endocrine antigen polypeptides (Shown in Table 1A, column 6) may be used to quantitatively or qualitatively detect the presence of endocrine antigen gene products or conserved variants or peptide fragments thereof. This can be accomplished, for example, by immunofluorescence techniques employing a fluorescently labeled antibody coupled with light microscopic, flow cytometric, or fluorimetric detection.

[0425] In an additional preferred embodiment, antibodies, or fragments of antibodies directed to a conformational epitope of an endocrine antigen may be used to quantitatively or qualitatively detect the presence of endocrine antigen gene products or conserved variants or peptide fragments thereof. This can be accomplished, for example, by immunofluorescence techniques employing a fluorescently labeled antibody coupled with light microscopic, flow cytometric, or fluorimetric detection.

[0426] The antibodies (or fragments thereof), and/or endocrine antigen polypeptides of the present invention may, additionally, be employed histologically, as in immunofluorescence, immunoelectron microscopy or non-immunological assays, for in situ detection of endocrine antigen gene products or conserved variants or peptide fragments thereof. In situ detection may be accomplished by removing a histological specimen from a patient, and applying thereto a labeled antibody or endocrine antigen polypeptide of the present invention. The antibody (or fragment thereof) or endocrine antigen polypeptide is preferably applied by overlaying the labeled antibody (or fragment) onto a biological sample. Through the use of such a procedure, it is possible to determine not only the presence of the endocrine antigen gene product, or conserved variants or peptide fragments, or endocrine antigen polypeptide binding, but also its distribution in the examined tissue. Using the present invention, those of ordinary skill will readily perceive that any of a wide variety of histological methods (such as staining procedures) can be modified in order to achieve such in situ detection.

[0427] Immunoassays and non-immunoassays for endocrine antigen gene products or conserved variants or peptide fragments thereof will typically comprise incubating a sample, such as a biological fluid, a tissue extract, freshly harvested cells, or lysates of cells which have been incubated in cell culture, in the presence of a detectably labeled antibody capable of binding endocrine antigen gene products or conserved variants or peptide fragments thereof, and detecting the bound antibody by any of a number of techniques well-known in the art.

[0428] The biological sample may be brought in contact with and immobilized onto a solid phase support or carrier such as nitrocellulose, or other solid support which is capable of immobilizing cells, cell particles or soluble proteins. The support may then be washed with suitable buffers followed by treatment with the detectably labeled anti-endocrine antigen antibody or detectable endocrine antigen polypeptide. The solid phase support may then be washed with the buffer a second time to remove unbound antibody or polypeptide. Optionally the antibody is subsequently labeled. The amount of bound label on solid support may then be detected by conventional means.

[0429] By “solid phase support or carrier” is intended any support capable of binding an antigen or an antibody. Well-known supports or carriers include glass, polystyrene, polypropylene, polyethylene, dextran, nylon, amylases, natural and modified celluloses, polyacrylamides; gabbros, and magnetite. The nature of the carrier can be either soluble to some extent or insoluble for the purposes of the present invention. The support material may have virtually any possible structural configuration so long as the coupled molecule is capable of binding to an antigen or antibody. Thus, the support configuration may be spherical, as in a bead, or cylindrical, as in the inside surface of a test tube, or the external surface of a rod. Alternatively, the surface may be flat such as a sheet, test strip, etc. Preferred supports include polystyrene beads. Those skilled in the art will know many other suitable carriers for binding antibody or antigen, or will be able to ascertain the same by use of routine experimentation.

[0430] The binding activity of a given lot of anti-endocrine antigen antibody or endocrine antigen polypeptide may be determined according to well known methods. Those skilled in the art will be able to determine operative and optimal assay conditions for each determination by employing routine experimentation.

[0431] In addition to assaying endocrine antigen polypeptide levels or polynucleotide levels in a biological sample obtained from an individual, endocrine antigen polypeptide or polynucleotide can also be detected in vivo by imaging. For example, in one embodiment of the invention, endocrine antigen polypeptide and/or anti-endocrine antigen antibodies are used to image endocrine system diseased cells, such as neoplasms. In another embodiment, endocrine antigen polynucleotides of the invention (e.g., polynucleotides complementary to all or a portion of endocrine antigen mRNA) and/or anti-endocrine antigen antibodies (e.g., antibodies directed to any one or a combination of the epitopes of endocrine antigens, antibodies directed to a conformational epitope of endocrine antigens, antibodies directed to the full length polypeptide expressed on the cell surface of a mammalian cell) are used to image diseased or neoplastic cells of the endocrine system.

[0432] Antibody labels or markers for in vivo imaging of endocrine antigen polypeptides include those detectable by X-radiography, NMR, MRI, CAT-scans or ESR. For X-radiography, suitable labels include radioisotopes such as barium or cesium, which emit detectable radiation but are not overtly harmful to the subject. Suitable markers for NMR and ESR include those with a detectable characteristic spin, such as deuterium, which may be incorporated into the antibody by labeling of nutrients for the relevant hybridoma. Where in vivo imaging is used to detect enhanced levels of endocrine antigen polypeptides for diagnosis in humans, it may be preferable to use human antibodies or “humanized” chimeric monoclonal antibodies. Such antibodies can be produced using techniques described herein or otherwise known in the art. For example methods for producing chimeric antibodies are known in the art. See, for review, Morrison, Science 229:1202 (1985); Oi et al., BioTechniques 4:214 (1986); Cabilly et al., U.S. Pat. No. 4,816,567; Taniguchi et al., EP 171496; Morrison et al., EP 173494; Neuberger et al., WO 8601533; Robinson et al., WO 8702671; Boulianne et al., Nature 312:643 (1984); Neuberger et al., Nature 314:268 (1985).

[0433] Additionally, any endocrine antigen polypeptides whose presence can be detected, can be administered. For example, endocrine antigen polypeptides labeled with a radio-opaque or other appropriate compound can be administered and visualized in vivo, as discussed, above for labeled antibodies. Further such endocrine antigen polypeptides can be utilized for in vitro diagnostic procedures.

[0434] An endocrine antigen polypeptide-specific antibody or antibody fragment which has been labeled with an appropriate detectable imaging moiety, such as a radioisotope (for example, ¹³¹I, ¹¹²In, ^{99m}Tc), a radio-opaque substance, or a material detectable by nuclear magnetic resonance, is introduced (for example, parenterally, subcutaneously or intraperitoneally) into the mammal to be examined for an endocrine system disorder. It will be understood in the art that the size of the subject and the imaging system used will determine the quantity of imaging moiety needed to produce diagnostic images. In the case of a radioisotope moiety, for a human subject, the quantity of radioactivity injected will normally range from about 5 to 20 millicuries of ^{99m}Tc. The labeled antibody or antibody fragment will then preferentially accumulate at the location of cells which contain endocrine antigen protein. In vivo tumor imaging is described in S. W. Burchiel et al., “Immunopharmacokinetics of Radiolabeled Antibodies and Their Fragments” (Chapter 13 in Tumor Imaging: The Radiochemical Detection of Cancer, S. W. Burchiel and B. A. Rhodes, eds., Masson Publishing Inc. (1982)).

[0435] With respect to antibodies, one of the ways in which the anti-endocrine antigen antibody can be detectably labeled is by linking the same to an enzyme and using the linked product in an enzyme immunoassay (EIA) (Voller, A., “The Enzyme Linked Immunosorbent Assay (ELISA)”, 1978, Diagnostic Horizons 2:1-7, Microbiological Associates Quarterly Publication, Walkersville, Md.); Voller et al., J. Clin. Pathol. 31:507-520 (1978); Butler, J. E., Meth. Enzymol. 73:482-523 (1981); Maggio, E. (ed.), 1980, Enzyme Immunoassay, CRC Press, Boca Raton, Fla.,; Ishikawa, E. et al., (eds.), 1981, Enzyme Immunoassay, Kgaku Shoin, Tokyo). The enzyme which is bound to the antibody will react with an appropriate substrate, preferably a chromogenic substrate, in such a manner as to produce a chemical moiety which can be detected, for example, by spectrophotometric, fluorimetric or by visual means. Enzymes which can be used to detectably label the antibody include, but are not limited to, malate dehydrogenase, staphylococcal nuclease, delta-5-steroid isomerase, yeast alcohol dehydrogenase, alpha-glycerophosphate, dehydrogenase, triose phosphate isomerase, horseradish peroxidase, alkaline phosphatase, asparaginase, glucose oxidase, beta-galactosidase, ribonuclease, urease, catalase, glucose-6-phosphate dehydrogenase, glucoamylase and acetylcholinesterase. Additionally, the detection can be accomplished by colorimetric methods which employ a chromogenic substrate for the enzyme. Detection may also be accomplished by visual comparison of the extent of enzymatic reaction of a substrate in comparison with similarly prepared standards.

[0436] Detection may also be accomplished using any of a variety of other immunoassays. For example, by radioactively labeling the antibodies or antibody fragments, it is possible to detect endocrine antigens through the use of a radioimmunoassay (RIA) (see, for example, Weintraub, B., Principles of Radioimmunoassays, Seventh Training Course on Radioligand Assay Techniques, The Endocrine Society, March, 1986, which is incorporated by reference herein). The radioactive isotope can be detected by means including, but not limited to, a gamma counter, a scintillation counter, or autoradiography.

[0437] It is also possible to label the antibody with a fluorescent compound. When the fluorescently labeled antibody is exposed to light of the proper wave length, its presence can then be detected due to fluorescence. Among the most commonly used fluorescent labeling compounds are fluorescein isothiocyanate, rhodamine, phycoerythrin, phycocyanin, allophycocyanin, ophthaldehyde and fluorescamine.

[0438] The antibody can also be detectably labeled using fluorescence emitting metals such as ¹⁵²Eu, or others of the lanthamide series. These metals can be attached to the antibody using such metal chelating groups as diethylenetriaminepentacetic acid (DTPA) or ethylenediaminetetraacetic acid (EDTA).

[0439] The antibody also can be detectably labeled by coupling it to a chemiluminescent compound. The presence of the chemiluminescent-tagged antibody is then determined by detecting the presence of luminescence that arises during the course of a chemical reaction. Examples of particularly useful chemiluminescent labeling compounds are luminol, isoluminol, theromatic acridinium ester, imidazole, acridinium salt and oxalate ester.

[0440] Likewise, a bioluminescent compound may be used to label the antibody of the present invention. Bioluminescence is a type of chemiluminescence found in biological systems in, which a catalytic protein increases the efficiency of the chemiluminescent reaction. The presence of a bioluminescent protein is determined by detecting the presence of luminescence. Important bioluminescent compounds for purposes of labeling are luciferin, luciferase and aequorin.

[0441] Methods for Detecting Endocrine System Disease, Including Cancer

[0442] In general, an endocrine system disease or cancer may be detected in a patient based on the presence of one or more endocrine antigen proteins of the invention and/or polynucleotides encoding such proteins in a biological sample (for example, blood, sera, urine, and/or tumor biopsies) obtained from the patient. In other words, such proteins and/or polynucleotides may be used as markers to indicate the presence or absence of an endocrine system disease or disorder, including cancer. Cancers that may be diagnosed, and/or prognosed using the compositions of the invention include but are not limited to, neoplasias of the testis and neo-testis, human thyroid carcinoma, Hurthle cell tumours of the thyroid, thyroid carcinoma, medullary thyroid carcinoma, pituitary adenoma, ovarian cancer, adrenocortical carcinoma, islet cell tumor syndrome. In addition, such proteins and/or polynucleotides may be useful for the detection of other diseases and cancers, including cancers of tissues/cells corresponding to the library source disclosed in column 7 of Table 1A expressing the corresponding endocrine system sequence disclosed in the same row of Table 1A. The binding agents provided herein generally permit detection of the level of antigen that binds to the agent in the biological sample. Polynucleotide primers and probes may be used to detect the level of mRNA encoding endocrine antigen polypeptides, which is also indicative of the presence or absence of an endocrine system disease or disorder, including cancer. In general, endocrine antigen polypeptides should be present at a level that is at least three fold higher in diseased tissue than in normal tissue.

[0443] There are a variety of assay formats known to those of ordinary skill in the art for using a binding agent to detect polypeptide markers in a sample. See, e.g., Harlow and Lane, supra. In general, the presence or absence of an endocrine system disease in a patient may be determined by (a) contacting a biological sample obtained from a patient with a binding agent; (b) detecting in the sample a level of polypeptide that binds to the binding agent; and (c) comparing the level of polypeptide with a predetermined cut-off value.

[0444] In a preferred embodiment, the assay involves the use of binding agent immobilized on a solid support to bind to and remove the endocrine antigen polypeptide of the invention from the remainder of the sample. The bound polypeptide may then be detected using a detection reagent that contains a reporter group and specifically binds to the binding agent/polypeptide complex. Such detection reagents may comprise, for example, a binding agent that specifically binds to the polypeptide or an antibody or other agent that specifically binds to the binding agent, such as an anti-immunoglobulin, protein G, protein A or a lectin. Alternatively, a competitive assay may be utilized, in which a polypeptide is labeled with a reporter group and allowed to bind to the immobilized binding agent after incubation of the binding agent with the sample. The extent to which components of the sample inhibit the binding of the labeled polypeptide to the binding agent is indicative of the reactivity of the sample with the immobilized binding agent. Suitable polypeptides for use within such assays include endocrine antigen polypeptides and portions thereof, or antibodies, to which the binding agent binds, as described above.

[0445] The solid support may be any material known to those of skill in the art to which endocrine antigen polypeptides of the invention may be attached. For example, -the solid support may be a test well in a microtiter plate or a nitrocellulose or other suitable membrane. Alternatively, the support may be a bead or disc, such as glass fiberglass, latex or a plastic material such as polystyrene or polyvinylchloride. The support may also be a magnetic particle or a fiber optic sensor, such as those disclosed, for example, in U.S. Pat. No. 5,359,681. The binding agent may be immobilized on the solid support using a variety of techniques known to those of skill in the art, which are amply described in the patent and scientific literature. In the context of the present invention, the term “immobilization” refers to both noncovalent association, such as adsorption, and covalent attachment (which may be a direct linkage between the agent and functional groups on the support or may be a linkage by way of a cross-linking agent). Immobilization by adsorption to a well in a microtiter plate or to a membrane is preferred. In such cases, adsorption may be achieved by contacting the binding agent, in a suitable buffer, with the solid support for the suitable amount of time. The contact time varies with temperature, but is typically between about 1 hour and about 1 day. In general, contacting a well of plastic microtiter plate (such as polystyrene or polyvinylchloride) with an amount of binding agent ranging from about 10 ng to about 10 ug, and preferably about 100 ng to about 1 ug, is sufficient to immobilize an adequate amount of binding agent.

[0446] Covalent attachment of binding agent to a solid support may generally be achieved by first reacting the support with a bifunctional reagent that will react with both the support and a functional group, such as a hydroxyl or amino group, on the binding agent. For example, the binding agent may be covalently attached to supports having an appropriate polymer coating using benzoquinone or by condensation of an aldehyde group on the support with an amine and an active hydrogen on the binding partner (see, e.g., Pierce Immunotechnology Catalog and Handbook, 1991, at A12-A13).

[0447] Gene Therapy Methods

[0448] Also encompassed by the present invention are gene therapy methods for treating or preventing disorders, diseases and conditions. The gene therapy methods relate to the introduction of nucleic acid (DNA, RNA and antisense DNA or RNA) sequences into an animal to achieve expression of an endocrine antigen of the present invention. This method requires a polynucleotide which codes for a polypeptide of the present invention operatively linked to a promoter and any other genetic elements necessary for the expression of the polypeptide by the target tissue. Such gene therapy and delivery techniques are known in the art, see, for example, WO90/11092, which is herein incorporated by reference.

[0449] Thus, for example, cells from a patient may be engineered with a polynucleotide (DNA or RNA) comprising a promoter operably linked to a polynucleotide of the present invention ex vivo, with the engineered cells then being provided to a patient to be treated with the polypeptide of the present invention. Such methods are well-known in the art. For example, see Belldegrun, A., et al., J. Natl. Cancer Inst. 85: 207-216 (1993); Ferrantini, M. et al., Cancer Research 53: 1107-1112 (1993); Ferrantini, M. et al., J. Immunology 153: 4604-4615 (1994); Kaido, T., et al., Int. J. Cancer 60: 221-229 (1995); Ogura, H., et al., Cancer Research 50: 5102-5106 (1990); Santodonato, L., et al., Human Gene Therapy 7:1-10 (1996); Santodonato, L., et al., Gene Therapy 4:1246-1255 (1997); and Zhang, J. -F. et al., Cancer Gene Therapy 3: 31-38 (1996)), which are herein incorporated by reference. In one embodiment, the cells which are engineered are arterial cells. The arterial cells may be reintroduced into the patient through direct injection to the artery, the tissues surrounding the artery, or through catheter injection.

[0450] As discussed in more detail below, the polynucleotide constructs can be delivered by any method that delivers injectable materials to the cells of an animal, such as, injection into the interstitial space of tissues (heart, muscle, skin, lung, liver, and the like). The polynucleotide constructs may be delivered in a pharmaceutically acceptable liquid or aqueous carrier.

[0451] In one embodiment, the polynucleotide of the present invention is delivered as a naked polynucleotide. The term “naked” polynucleotide, DNA or RNA refers to sequences that are free from any delivery vehicle that acts to assist, promote or facilitate entry into the cell, including viral sequences, viral particles, liposome formulations, lipofectin or precipitating agents and the like. However, the polynucleotide of the present invention can also be delivered in liposome formulations and lipofectin formulations and the like can be prepared by methods well known to those skilled in the art. Such methods are described, for example, in U.S. Pat. Nos. 5,593,972, 5,589,466, and 5,580,859, which are herein incorporated by reference.

[0452] The polynucleotide vector constructs used in the gene therapy method are preferably constructs that will not integrate into the host genome nor will they contain sequences that allow for replication. Appropriate vectors include pWLNEO, pSV2CAT, pOG44, pXT1 and pSG available from Stratagene; pSVK3, pBPV, pMSG and pSVL available from Pharmacia; and pEF1/V5, pcDNA3.1, and pRc/CMV2 available from Invitrogen. Other suitable vectors will be readily apparent to the skilled artisan.

[0453] Any strong promoter known to those skilled in the art can be used for driving the expression of the polynucleotide sequence. Suitable promoters include adenoviral promoters, such as the adenoviral major late promoter; or heterologous promoters, such as the cytomegalovirus (CMV) promoter; the respiratory syncytial virus (RSV) promoter; inducible promoters, such as the MMT promoter, the metallothionein promoter; heat shock promoters; the albumin promoter; the ApoAI promoter; human globin promoters; viral thymidine kinase promoters, such as the Herpes Simplex thymidine kinase promoter; retroviral LTRs; the b-actin promoter; and human growth hormone promoters. The promoter also may be the native promoter for the polynucleotide of the present invention.

[0454] Unlike other gene therapy techniques, one major advantage of introducing naked nucleic acid sequences into target cells is the transitory nature of the polynucleotide synthesis in the cells. Studies have shown that non-replicating DNA sequences can be introduced into cells to provide production of the desired polypeptide for periods of up to six months.

[0455] The polynucleotide construct can be delivered to the interstitial space of tissues within the an animal, including of muscle, skin, brain, lung, liver, spleen, bone marrow, thymus, heart, lymph, blood, bone, cartilage, pancreas, kidney, gall bladder, stomach, intestine, testis, ovary, uterus, rectum, nervous system, eye, gland, and connective tissue. Interstitial space of the tissues comprises the intercellular, fluid, mucopolysaccharide matrix among the reticular fibers of organ tissues, elastic fibers in the walls of vessels or chambers, collagen fibers of fibrous tissues, or that same matrix within connective tissue ensheathing muscle cells or in the lacunae of bone. It is similarly the space occupied by the plasma of the circulation and the lymph fluid of the lymphatic channels. Delivery to the interstitial space of muscle tissue is preferred for the reasons discussed below. They may be conveniently delivered by injection into the tissues comprising these cells. They are preferably delivered to and expressed in persistent, non-dividing cells which are differentiated, although delivery and expression may be achieved in non-differentiated or less completely differentiated cells, such as, for example, stem cells of blood or skin fibroblasts. In vivo muscle cells are particularly competent in their ability to take up and express polynucleotides.

[0456] For the naked nucleic acid sequence injection, an effective dosage amount of DNA or RNA will be in the range of from about 0.05 mg/kg body weight to about 50 mg/kg body weight. Preferably the dosage will be from about 0.005 mg/kg to about 20 mg/kg and more preferably from about 0.05 mg/kg to about 5 mg/kg. Of course, as the artisan of ordinary skill will appreciate, this dosage will vary according to the tissue site of injection. The appropriate and effective dosage of nucleic acid sequence can readily be determined by those of ordinary skill in the art and may depend on the condition being treated and the route of administration.

[0457] The preferred route of administration is by the parenteral route of injection into the interstitial space of tissues. However, other parenteral routes may also be used, such as, inhalation of an aerosol formulation particularly for delivery to lungs or bronchial tissues, throat or mucous membranes of the nose. In addition, naked DNA constructs can be delivered to arteries during angioplasty by the catheter used in the procedure.

[0458] The naked polynucleotides are delivered by any method known in the art, including, but not limited to, direct needle injection at the delivery site, intravenous injection, topical administration, catheter infusion, and so-called “gene guns”. These delivery methods are known in the art.

[0459] The constructs may also be delivered with delivery vehicles such as viral sequences, viral particles, liposome formulations, lipofectin, precipitating agents, etc. Such methods of delivery are known in the art.

[0460] In certain embodiments, the polynucleotide constructs are complexed in a liposome preparation. Liposomal preparations for use in the instant invention include cationic (positively charged), anionic (negatively charged) and neutral preparations. However, cationic liposomes are particularly preferred because a tight charge complex can be formed between the cationic liposome and the polyanionic nucleic acid. Cationic liposomes have been shown to mediate intracellular delivery of plasmid DNA (Feigner et al., Proc. Natl. Acad. Sci. USA (1987) 84:7413-7416, which is herein incorporated by reference); mRNA (Malone et al., Proc. Natl. Acad. Sci. USA (1989) 86:6077-6081, which is herein incorporated by reference); and purified transcription factors (Debs et al., J. Biol. Chem. (1990) 265:10189-10192, which is herein incorporated by reference), in functional form.

[0461] Cationic liposomes are readily available. For example, N-[1-2,3-dioleyloxy)propyl]-N,N,N-triethylammonium (DOTMA) liposomes are particularly useful and are available under the trademark Lipofectin, from GIBCO BRL, Grand Island, N.Y., (see, also, Feigner et al., Proc. Natl Acad. Sci. USA (1987) 84:7413-7416, which is herein incorporated by reference). Other commercially available liposomes include transfectace (DDAB/DOPE) and DOTAP/DOPE (Boehringer).

[0462] Other cationic liposomes can be prepared from readily available materials using techniques well known in the art. See, e.g. PCT Publication No. WO 90/11092 (which is herein incorporated by reference) for a description of the synthesis of DOTAP (1,2-bis(oleoyloxy)-3-(trimethylammonio)propane) liposomes. Preparation of DOTMA liposomes is explained in the literature, see, e.g., P. Feigner et al., Proc. Natl. Acad. Sci. USA 84:7413-7417, which is herein incorporated by reference. Similar methods can be used to prepare liposomes from other cationic lipid materials.

[0463] Similarly, anionic and neutral liposomes are readily available, such as from Avanti Polar Lipids (Birmingham, Ala.), or can be easily prepared using readily available materials. Such materials include phosphatidyl choline, cholesterol, phosphatidyl ethanolamine, dioleoylphosphatidyl choline (DOPC), dioleoylphosphatidyl glycerol (DOPG), dioleoylphoshatidyl ethanolamine (DOPE), among others. These materials can also be mixed with the DOTMA and DOTAP starting materials in appropriate ratios. Methods for making liposomes using these materials are well known in the art.

[0464] For example, commercially dioleoylphosphatidyl choline (DOPC), dioleoylphosphatidyl glycerol (DOPG), and dioleoylphosphatidyl ethanolamine (DOPE) can be used in various combinations to make conventional liposomes, with or without the addition of cholesterol. Thus, for example, DOPG/DOPC vesicles can be prepared by drying 50 mg each of DOPG and DOPC under a stream of nitrogen gas into a sonication vial. The sample is placed under a vacuum pump overnight and is hydrated the following day with deionized water. The sample is then sonicated for 2 hours in a capped vial, using a Heat Systems model 350 sonicator equipped with an inverted cup (bath type) probe at the maximum setting while the bath is circulated at 15EC. Alternatively, negatively charged vesicles can be prepared without sonication to produce multilamellar vesicles or by extrusion through nucleopore membranes to produce unilamellar vesicles of discrete size. Other methods are known and available to those of skill in the art.

[0465] The liposomes can comprise multilamellar vesicles (MLVs), small unilamellar vesicles (SUVs), or large unilamellar vesicles (LUVs), with SUVs being preferred. The various liposome-nucleic acid complexes are prepared using methods well known in the art. See, e.g., Straubinger et al., Methods of Immunology (1983), 101:512-527, which is herein incorporated by reference. For example, MLVs containing nucleic acid can be prepared by depositing a thin film of phospholipid on the walls of a glass tube and subsequently hydrating with a solution of the material to be encapsulated. SUVs are prepared by extended sonication of MLVs to produce a homogeneous population of unilamellar liposomes. The material to be entrapped is added to a suspension of preformed MLVs and then sonicated. When using liposomes containing cationic lipids, the dried lipid film is resuspended in an appropriate solution such as sterile water or an isotonic buffer solution such as 10 mM Tris/NaCl, sonicated, and then the preformed liposomes are mixed directly with the DNA. The liposome and DNA form a very stable complex due to binding of the positively charged liposomes to the cationic DNA. SUVs find use with small nucleic acid fragments. LUVs are prepared by a number of methods, well known in the art. Commonly used methods include Ca²⁺-EDTA chelation (Papahadjopoulos et al., Biochim. Biophys. Acta (1975) 394:483; Wilson et al., Cell 17:77 (1979); ether injection (Deamer, D. and Bangham, A., Biochim. Biophys. Acta 443:629 (1976); Ostro et al., Biochem. Biophys. Res. Commun. 76:836 (1977); Fraley et al., Proc. Natl. Acad. Sci. USA 76:3348 (1979)); detergent dialysis (Enoch, H. and Strittmatter, P., Proc. Natl. Acad. Sci. USA 76:145 (1979)); and reverse-phase evaporation (REV) (Fraley et al., J. Biol. Chem. 255:10431 (1980); Szoka et al., Proc. Natl. Acad. Sci. USA 75:145 (1978); Schaefer-Ridder et al., Science 215:166 (1982)), which are herein incorporated by reference.

[0466] Generally, the ratio of DNA to liposomes will be from about 10:1 to about 1:10. Preferably, the ration will be from about 5:1 to about 1:5. More preferably, the ration will be about 3:1 to about 1:3. Still more preferably, the ratio will be about 1:1.

[0467] U.S. Pat. No. 5,676,954 (which is herein incorporated by reference) reports on the injection of genetic material, complexed with cationic liposomes carriers, into mice. U.S. Pat. Nos. 4,897,355, 4,946,787, 5,049,386, 5,459,127, 5,589,466, 5,693,622, 5,580,859, 5,703,055, and international publication no. WO 94/9469 (which are herein incorporated by reference) provide cationic lipids for use in transfecting DNA into cells and mammals. U.S. Pat. Nos. 5,589,466, 5,693,622, 5,580,859, 5,703,055, and International Publication No. WO 94/9469 provide methods for delivering DNA-cationic lipid complexes to mammals.

[0468] In certain embodiments, cells are engineered, ex vivo or in vivo, using a retroviral particle containing RNA which comprises a sequence encoding a polypeptide of the present invention. Retroviruses from which the retroviral plasmid vectors may be derived include, but are not limited to, Moloney Murine Leukemia Virus, spleen necrosis virus, Rous sarcoma Virus, Harvey Sarcoma Virus, avian leukosis virus, gibbon ape leukemia virus, human immunodeficiency virus, Myeloproliferative Sarcoma Virus, and mammary tumor virus.

[0469] The retroviral plasmid vector is employed to transduce packaging cell lines to form producer cell lines. Examples of packaging cells which may be transfected include, but are not limited to, the PE501, PA317, R-2, R-AM, PA12, T19-14×, VT-19-17-H2, RCRE, RCRIP, GP+E-86, GP+envAm12, and DAN cell lines as described in Miller, Human Gene Therapy 1:5-14 (1990), which is incorporated herein by reference in its entirety. The vector may transduce the packaging cells through any means known in the art. Such means include, but are not limited to, electroporation, the use of liposomes, and CaPO₄ precipitation. In one alternative, the retroviral plasmid vector may be encapsulated into a liposome, or coupled to a lipid, and then administered to a host.

[0470] The producer cell line generates infectious retroviral vector particles which include polynucleotide encoding a polypeptide of the present invention. Such retroviral vector particles then may be employed, to transduce eukaryotic cells, either in vitro or in vivo. The transduced eukaryotic cells will express a polypeptide of the present invention.

[0471] In certain other embodiments, cells are engineered, ex vivo or in vivo, with polynucleotide contained in an adenovirus vector. Adenovirus can be manipulated such that it encodes and expresses a polypeptide of the present invention, and at the same time is inactivated in terms of its ability to replicate in a normal lytic viral life cycle. Adenovirus expression is achieved without integration of the viral DNA into the host cell chromosome, thereby alleviating concerns about insertional mutagenesis. Furthermore, adenoviruses have been used as live enteric vaccines for many years with an excellent safety profile (Schwartz, et al., Am. Rev. Respir. Dis.109:233-238 (1974)). Finally, adenovirus mediated gene transfer has been demonstrated in a number of instances including transfer of alpha-1-antitrypsin and CFTR to the lungs of cotton rats (Rosenfeld et al., Science 252:431-434 (1991); Rosenfeld et al., Cell 68:143-155 (1991)). Furthermore, extensive studies to attempt to establish adenovirus as a causative agent in human cancer were uniformly negative (Green et al., Proc. Natl. Acad. Sci. USA 76:6606 (1979)).

[0472] Suitable adenoviral vectors useful in the present invention are described, for example, in Kozarsky and Wilson, Curr. Opin. Genet. Devel. 3:499-503 (1993); Rosenfeld et al., Cell 68:143-155 (1992); Engelhardt et al., Human Genet. Ther. 4:759-769 (1993); Yang et al., Nature Genet. 7:362-369 (1994); Wilson et al., Nature 365:691-692 (1993); and U.S. Pat. No. 5,652,224, which are herein incorporated by reference. For example, the adenovirus vector Ad2 is useful and can be grown in human 293 cells. These cells contain the E1 region of adenovirus and constitutively express E1a and E1b, which complement the defective adenoviruses by providing the products of the genes deleted from the vector. In addition to Ad2, other varieties of adenovirus (e.g., Ad3, Ad5, and Ad7) are also useful in the present invention.

[0473] Preferably, the adenoviruses used in the present invention are replication deficient. Replication deficient adenoviruses require the aid of a helper virus and/or packaging cell line to form infectious particles. The resulting virus is capable of infecting cells and can express a polynucleotide of interest which is operably linked to a promoter, but cannot replicate in most cells. Replication deficient adenoviruses may be deleted in one or more of all or a portion of the following genes: E1a, E1b, E3, E4, E2a, or L1 through L5.

[0474] In certain other embodiments, the cells are engineered, ex vivo or in vivo, using an adeno-associated virus (AAV). AAVs are naturally occurring defective viruses that require helper viruses to produce infectious particles (Muzyczka, N., Curr. Topics in Microbiol. Immunol. 158:97 (1992)). It is also one of the few viruses that may integrate its DNA into non-dividing cells. Vectors containing as little as 300 base pairs of AAV can be packaged and can integrate, but space for exogenous DNA is limited to about 4.5 kb. Methods for producing and using such AAVs are known in the art. See, for example, U.S. Pat. Nos. 5,139,941, 5,173,414, 5,354,678, 5,436,146, 5,474,935, 5,478,745, and 5,589,377. 104481 For example, an appropriate AAV vector for use in the present invention will include all the sequences necessary for DNA replication, encapsidation, and host-cell integration. The polynucleotide construct is inserted into the AAV vector using standard cloning methods, such as those found in Sambrook et al., Molecular Cloning: A Laboratory Manual, Cold Spring Harbor Press (1989). The recombinant AAV vector is then transfected into packaging cells which are infected with a helper virus, using any standard technique, including lipofection, electroporation, calcium phosphate precipitation, etc. Appropriate helper viruses include adenoviruses, cytomegaloviruses, vaccinia viruses, or herpes viruses. Once the packaging cells are transfected and infected, they will produce infectious AAV viral particles which contain the polynucleotide construct. These viral particles are then used to transduce eukaryotic cells, either ex vivo or in vivo. The transduced cells will contain the polynucleotide construct integrated into its genome, and will express a polypeptide of the invention.

[0475] Another method of gene therapy involves operably associating heterologous control regions and endogenous endocrine antigen polynucleotide sequences (e.g., encoding an endocrine antigen polypeptide of the present invention) via homologous recombination (see, e.g., U.S. Pat. No. 5,641,670, issued Jun. 24, 1997; International Publication No. WO 96/29411, published Sep. 26, 1996; International Publication No. WO 94/12650, published Aug. 4, 1994; Koller et al., Proc. Natl. Acad. Sci. USA 86:8932-8935 (1989); and Zijlstra et al., Nature 342:435-438 (1989), which are herein incorporated by reference. This method involves the activation of a gene which is present in the target cells, but which is not normally expressed in the cells, or is expressed at a lower level than desired.

[0476] Polynucleotide constructs are made, using standard techniques known in the art, which contain the promoter with targeting sequences flanking the promoter. Suitable promoters are described herein. The targeting sequence is sufficiently complementary to an endogenous sequence to permit homologous recombination of the promoter-targeting sequence with the endogenous sequence. The targeting sequence will be sufficiently near the 5′ end of the desired endogenous polynucleotide sequence so the promoter will be operably linked to the endogenous sequence upon homologous recombination.

[0477] The promoter and the targeting sequences can be amplified using PCR. Preferably, the amplified promoter contains distinct restriction enzyme sites on the 5′ and 3′ ends. Preferably, the 3′ end of the first targeting sequence contains the same restriction enzyme site as the 5′ end of the amplified promoter and the 5′ end of the second targeting sequence contains the same restriction site as the 3′ end of the amplified promoter. The amplified promoter and targeting sequences are digested and ligated together.

[0478] The promoter-targeting sequence construct is delivered to the cells, either as naked polynucleotide, or in conjunction with transfection-facilitating agents, such as liposomes, viral sequences, viral particles, whole viruses, lipofection, precipitating agents, etc., described in more detail above. The P promoter-targeting sequence can be delivered by any method, included direct needle injection, intravenous injection, topical administration, catheter infusion, particle accelerators, etc. The methods are described in more detail below.

[0479] The promoter-targeting sequence construct is taken up by cells. Homologous recombination between the construct and the endogenous sequence takes place, such that an endogenous sequence is placed under the control of the promoter. The promoter then drives the expression of the endogenous sequence.

[0480] The polynucleotide encoding a polypeptide of the present invention may contain a secretory signal sequence that facilitates secretion of the protein. Typically, the signal sequence is positioned in the coding region of the polynucleotide to be expressed towards or at the 5′ end of the coding region. The signal sequence may be homologous or heterologous to the endocrine antigen polynucleotide of interest and may be homologous or heterologous to the cells to be transfected. Additionally, the signal sequence may be chemically synthesized using methods known in the art.

[0481] Any mode of administration of any of the above-described polynucleotides constructs can be used so long as the mode results in the expression of one or more molecules in an amount sufficient to provide a therapeutic effect. This includes direct needle injection, systemic injection, catheter infusion, biolistic injectors, particle accelerators (i e., “gene guns”), gelfoam sponge depots, other commercially available depot materials, osmotic pumps (e.g., Alza minipumps), oral or suppositorial solid (tablet or pill) pharmaceutical formulations, and decanting or topical applications during surgery. For example, direct injection of naked calcium phosphate-precipitated plasmid into rat liver and rat spleen or a protein-coated plasmid into the portal vein has resulted in gene expression of the foreign gene in the rat livers (Kaneda et al., Science 243:375 (1989)).

[0482] A preferred method of local administration is by direct injection. Preferably, a recombinant molecule of the present invention complexed with a delivery vehicle is administered by direct injection into or locally within the area of arteries. Administration of a composition locally within the area of arteries refers to injecting the composition centimeters and preferably, millimeters within arteries.

[0483] Another method of local administration is to contact a polynucleotide construct of the present invention in or around a surgical wound. For example, a patient can undergo surgery and the polynucleotide construct can be coated on the surface of tissue inside the wound or the construct can be injected into areas of tissue inside the wound.

[0484] Therapeutic compositions useful in systemic administration, include recombinant molecules of the present invention complexed to a targeted delivery vehicle of the present invention. Suitable delivery vehicles for use with systemic administration comprise liposomes comprising ligands for targeting the vehicle to a particular site. In specific embodiments, suitable delivery vehicles for use with systemic administration comprise liposomes comprising polypeptides of the invention for targeting the vehicle to a particular site.

[0485] Preferred methods of systemic administration, include intravenous injection, aerosol, oral and percutaneous (topical) delivery. Intravenous injections can be performed using methods standard in the art. Aerosol delivery can also be performed using methods standard in the art (see, for example, Stribling et al., Proc. Natl. Acad. Sci. USA 189:11277-11281, 1992, which is incorporated herein by reference). Oral delivery can be performed by complexing a polynucleotide construct of the present invention to a carrier capable of withstanding degradation by digestive enzymes in the gut of an animal. Examples of such carriers, include plastic capsules or tablets, such as those known in the art. Topical delivery can be performed by mixing a polynucleotide construct of the present invention with a lipophilic reagent (e.g., DMSO) that is capable of passing into the skin.

[0486] Determining an effective amount of substance to be delivered can depend upon a number of factors including, for example, the chemical structure and biological activity of the substance, the age and weight of the animal, the precise condition requiring treatment and its severity, and the route of administration. The frequency of treatments depends upon a number of factors, such as the amount of polynucleotide constructs administered per dose, as well as the health and history of the subject. The precise amount, number of doses, and timing of doses will be determined by the attending physician or veterinarian.

[0487] Therapeutic compositions of the present invention can be administered to any animal, preferably to mammals and birds. Preferred mammals include humans, dogs, cats, mice, rats, rabbits sheep, cattle, horses and pigs, with humans being particularly preferred.

[0488] Biological Activities

[0489] Polynucleotides or polypeptides, or agonists or antagonists of the present invention, can be used in assays to test for one or more biological activities. If these polynucleotides or polypeptides, or agonists or antagonists of the present invention, do exhibit activity in a particular assay, it is likely that these molecules may be involved in the diseases associated with the biological activity. Thus, the polynucleotides and polypeptides, and agonists or antagonists could be used to treat, prevent diagnose and/or prognose the associated disease.

[0490] The endocrine antigen polynucleotides and polypeptides of the invention and predicted to have predominant expression in endocrine system tissues.

[0491] Endocrine-associated proteins are believed to be involved in biological activities associated with diseases and/or disorders of the endocrine system and/or diseases and/or disorders related to hormone imbalance. Accordingly, compositions of the invention (including polynucleotides, polypeptides and antibodies of the invention, and fragments and variants thereof) may be used in the diagnosis, prognosis, prevention, and/or treatment of diseases and/or disorders associated with aberrant endocrine system, hormone and/or homone antagonist related activity.

[0492] In preferred embodiments, compositions of the invention (including polynucleotides, polypeptides and antibodies of the invention, and fragments and variants thereof) may be, used in the diagnosis, prognosis, prevention, and/or treatment of diseases and/or disorders relating to endocrine disorders (e.g., disorders of the pancreas, disorders of the pituitary gland, disorders of the adrenal glands, disorders of the hypothalamus, disorders of the thyroid gland, disorders of the parathyroid gland, disorders of the ovaries, disorders of the testes, and/or disorders of the placenta) and neoplastic disorders (e.g., pheochromocytoma, neuroblastoma, multiple endocrine neoplasia, cancers of endocrine tissues), and/or as described under the sections entitled and/or as described under “Endocrine Disorders,” “Reproductive Disorders,” “Gastrointestinal Disorders” and “Hyperproliferative Disorders” below.

[0493] In additional preferred embodiments, compositions of the invention (Including polynucleotides, polypeptides and antibodies of the invention, and fragments and variants thereof) may be used in the diagnosis, prognosis, prevention, and/or treatment of reproductive disorders (e.g., infertility and impotence), menstrual disorders (e.g., pre-menstrual syndrome, dysmenorrhea, amenorrhea, menorrhagia, endometriosis), and/or complications of pregnancy (e.g., miscarriage, preterm labor, ectopic pregnancy, and preeclampsia).

[0494] In another embodiment, a polypeptide of the invention, or polynucleotides, antibodies, agonists, or antagonists corresponding to that polypeptide, may be used to diagnose, prognose, prevent, and/or treat diseases and/or disorders associated with the tissue(s) in which the polypeptide of the invention is expressed, including one, two, three, four, five, or more tissues disclosed in Table 1A, column 8 (Tissue Distribution Library Code).

[0495] Thus, polynucleotides, translation products and antibodies of the invention are useful in the diagnosis, prognosis, prevention, and/or treatment of diseases and/or disorders associated with activities that include, but are not limited to, hormone production, hormone regulation, honnone adsorption, hormone storage, hormone secretion, and/or responsiveness to hormones.

[0496] The endocrine antigens of the invention may be useful as therapeutic molecules. Each would be useful for diagnosis, detection, treatment and/or prevention of diseases or disorders of the endocrine system, including but not limited to, Addison's disease, Cushing's syndrome, Thyrotoxicosis, Graves' disease, gigantism, pheochromocytoma, neuroblastoma, Berardinelli-Seip Congenital Lipodystrophy, Carney complex, Schmidt syndrome, precocious puberty, Borjeson-Forssman-Lehmann syndrome, Von Hippel-Lindau syndrome, Johanson-Blizzard syndrome, multiple endocrine neoplasia autoimmune polyendocrinopathy syndrome, Beckwith-Wiedemann syndrome, hyponatremia, cyclical mastalgia, invasive thymoma, toxic multinodular goitre, androgen-insensitivity syndrome, sertoli cell tumors, sex cord-stromal tumors, thyrotropin deficiency, Pendred syndrome, Thyrocerebroretinal syndrome, macrosomia adiposa congenita, adrenomyodystrophy, chromogranin, Retinohepatoendocrinologic syndrome, aniridia, adrenoleukodystrophy, Werner syndrome, Patterson pseudoleprechaunism syndrome, Rhyns syndrome, Bardet-Biedl syndrome, Reifenstein syndrome, chronic adrenocortical insufficiency and disorders and/or cancers of endocrine tissues, including but not limited to, pancreas (e.g., congenital pancreatic agenesis, diabetes mellitus, diabetes insipidis, pheochromocytoma—islet cell tumor syndrome, nesidioblastosis of pancreas, islet cell adenomatosis); adrenal cortex (e.g., adrenoleukodystrophy, adrenal hypoplasia, adrenocortical carcinoma); ovary (e.g., ovarian cancer, polycystic ovary syndrome); pituitary (e.g., hyper-, hypopituitarism, pituitary dwarfism, pituitary adenoma, panhypopituitarism, thyrotropin deficiency, pituitary cretinism, McCune-Albright syndrome, acromegaly, Albright hereditary osteodystrophy, Kallmann syndrome); thyroid (e.g., hyper-, hypothyroidism, thyroid hormone coupling defect, thymic aplasia, human thyroid carcinoma, Hurthle cell tumours of the thyroid, thyroid carcinoma, medullary thyroid carcinoma, myxedema and cretinism, congenital hypothyroidism); parathyroid (e.g., hyper-, hypoparathyroidism, hyperparathyroidism); hypothallamus; and testes (e.g., capillary haemangioma of the testis (benign), neoplasias of the testis and neo-testis, testicular regression syndrome).

[0497] In a preferred embodiment, polynucleotides of the invention (e.g., a nucleic acid sequence of SEQ ID NO:X or the complement thereof; or the cDNA sequence contained in Clone ID NO:Z, or fragments or variants thereof) and/or polypeptides of the invention (e.g., an amino acid sequence contained in SEQ ID NO:Y, an amino acid sequence encoded by SEQ ID NO:X, or the complement threof, an amino acid sequence encoded by the cDNA sequence contained in Clone ID NO:Z and fragments or variants thereof as described herein) are useful for the diagnosis, detection, treatement, and/or prevention of diseases or disorders of the tissues/cells corresponding to the library source disclosed in column 7 of Table 1A expressing the corresponding endocrine sequence disclosed in the same row of Table 1A.

[0498] Particularly, the endocrine antigens may be a useful therapeutic for cancers of endocrine system tissues. Treatment, diagnosis, detection, and/or prevention of endocrine system disorders could be carried out using an endocrine antigen or soluble form of an endocrine antigen, an endocrine antigen ligand, gene therapy, or ex vivo applications. Moreover, inhibitors of an endocrine antigen, either blocking antibodies or mutant forms, could modulate the expression of the endocrine antigen. These inhibitors may be useful to treat, diagnose, detect, and/or prevent diseases associated with the misregulation of an endocrine antigen.

[0499] In one embodiment, the invention provides a method for the specific delivery of compositions of the invention to cells (e.g., normal or diseased endocrine cells) by administering polypeptides of the invention (e.g., endocrine antigen polypeptides or anti-endocrine antigen antibodies) that are associated with heterologous polypeptides or nucleic acids. In one example, the invention provides a method for delivering a therapeutic protein into the targeted cell (e.g., an aberrant endocrine cell or cancerous endocrine cell). In another example, the invention provides a method for delivering a single stranded nucleic acid (e.g., antisense or ribozymes) or double stranded nucleic acid (e.g., DNA that can integrate into the cell's genome or replicate episomally and that can be transcribed) into the targeted cell.

[0500] In another embodiment, the invention provides a method for the specific destruction of cells (e.g., the destruction of aberrant endocrine cells, including, but not limited to, endocrine tumor cells) by administering polypeptides of the invention (e.g., endocrine antigen polypeptides or fragments thereof, or anti-endocrine antigen antibodies) in association with toxins or cytotoxic prodrugs.

[0501] By “toxin” is meant compounds that bind and activate endogenous cytotoxic effector systems, radioisotopes, holotoxins, modified toxins, catalytic subunits of toxins, cytotoxins (cytotoxic agents), or any molecules or enzymes not normally present in or on the surface of a cell that under defined conditions cause the cell's death. Toxins that may be used according to the methods of the invention include, but are not limited to, radioisotopes known in the art, compounds such as, for example, antibodies (or complement fixing containing portions thereof) that bind an inherent or induced endogenous cytotoxic effector system, thymidine kinase, endonuclease, RNAse, alpha toxin, ricin, abrin, Pseudomonas exotoxin A, diphtheria toxin, saporin, momordin, gelonin, pokeweed antiviral protein, alpha-sarcin and cholera toxin. “Toxin” also includes a cytostatic or cytocidal agent, a therapeutic agent or a radioactive metal ion, e.g., alpha-emitters such as, for example, ²¹³Bi, or other radioisotopes such as, for example, ¹⁰³Pd, ¹³³Xe, ¹³¹I, ⁶⁸Ge, ⁵⁷C, ⁶⁵Zn, ⁸⁵Sr, ³²P, ³⁵S, ⁹⁰Y, ¹⁵³Sm, ¹⁵³Gd, ¹⁶⁹Yb, ⁵¹Cr, ⁵⁴Mn ⁷⁵Se, ¹¹³In, ⁹⁰Yttrium, ¹¹⁷Tin, ¹⁸⁶Rhenium, ¹⁶⁶Holmium, and ¹⁸⁸Rhenium; luminescent labels, such as luminol; and fluorescent labels, such as fluorescein and rhodamine, and biotin.

[0502] Techniques known in the art may be applied to label antibodies of the invention. Such techniques include, but are not limited to, the use of bifunctional conjugating agents (see e.g., U.S. Pat. Nos. 5,756,065; 5,714,631; 5,696,239; 5,652,361; 5,505,931; 5,489,425; 5,435,990; 5,428,139; 5,342,604; 5,274,119; 4,994,560; and 5,808,003; the contents of each of which are hereby incorporated by reference in its entirety). A cytotoxin or cytotoxic agent includes any agent that is detrimental to cells. Examples include paclitaxol, cytochalasin B, gramicidin D, ethidium bromide, emetine, mitomycin, etoposide, tenoposide, vincristine, vinblastine, colchicin, doxorubicin, daunorubicin, dihydroxy anthracin dione, mitoxantrone, mithramycin, actinomycin D, 1-dehydrotestosterone, glucocorticoids, procaine, tetracaine, lidocaine, propranolol, and puromycin and analogs or homologs thereof. Therapeutic agents include, but are not limited to, antimetabolites (e.g., methotrexate, 6-mercaptopurine, 6-thioguanine, cytarabine, 5-fluorouracil decarbazine), alkylating agents (e.g., mechlorethamine, thioepa chlorambucil, melphalan, carmustine (BSNU) and lomustine (CCNU), cyclothosphamide, busulfan, dibromomannitol, streptozotocin, mitomycin C, and cis-dichlorodiamine platinum (11) (DDP) cisplatin), anthracyclines (e.g., daunorubicin (formerly daunomycin) and doxorubicin), antibiotics (e.g., dactinomycin (formerly actinomycin), bleomycin, mithramycin, and anthramycin (AMC)), and anti-mitotic agents (e.g., vincristine and vinblastine).

[0503] By “cytotoxic prodrug” is meant a non-toxic compound that is converted by an enzyme, normally present in the cell, into a cytotoxic compound. Cytotoxic prodrugs that may be used according to the methods of the invention include, but are not limited to, glutamyl derivatives of benzoic acid mustard alkylating agent, phosphate derivatives of etoposide or mitomycin C, cytosine arabinoside, daunorubisin, and phenoxyacetamide derivatives of doxorubicin.

[0504] It will be appreciated that conditions caused by a decrease in the standard or normal level of an endocrine antigen activity in an individual, particularly disorders of the endocrine system, can be treated by administration of an endocrine antigen polypeptide (e.g., such as, for example, the complete endocrine antigen polypeptide, the soluble form of the extracellular domain of an endocrine antigen polypeptide, or cells expressing the complete protein) or agonist. Thus, the invention also provides a method of treatment of an individual in need of an increased level of endocrine antigen activity comprising administering to such an individual a pharmaceutical composition comprising an amount of an isolated endocrine antigen polypeptide of the invention, or agonist thereof (e.g., an agonistic anti-endocrine antigen antibody), effective to increase the endocrine antigen activity level in such an individual.

[0505] It will also be appreciated that conditions caused by a increase in the standard or normal level of endocrine antigen activity in an individual, particularly disorders of the endocrine system, can be treated by administration of endocrine antigen polypeptides (e.g., such as, for example, the complete endocrine antigen polypeptide, the soluble form of the extracellular domain of an endocrine antigen polypeptide, or cells expressing the complete protein) or antagonist (e.g., an antagonistic endocrine antigen antibody). Thus, the invention also provides a method of treatment of an individual in need of an decreased level of endocrine antigen activity comprising administering to such an individual a pharmaceutical composition comprising an amount of an isolated endocrine antigen polypeptide of the invention, or antagonist thereof (e.g., an antagonistic anti-endocrine antigen antibody), effective to decrease the endocrine antigen activity level in such an individual.

[0506] More generally, polynucleotides, translation products and antibodies corresponding to this gene may be useful for the diagnosis, detection and/or treatment of diseases and/or disorders associated with the following systems.

[0507] Endocrine Disorders

[0508] Polynucleotides or polypeptides, or agonists or antagonists of the present invention, may be used to treat, prevent, diagnose, and/or prognose disorders and/or diseases related to hormone imbalance, and/or disorders or diseases of the endocrine system.

[0509] Hormones secreted by the glands of the endocrine system control physical growth, sexual function, metabolism, and other functions. Disorders may be classified in two ways: disturbances in the production of hormones, and the inability of tissues to respond to hormones. The etiology of these hormone imbalance or endocrine system diseases, disorders or conditions may be genetic, somatic, such as cancer and some autoimmune diseases, acquired (e.g., by chemotherapy, injury or toxins), or infectious. Moreover, polynucleotides, polypeptides, antibodies, and/or agonists or antagonists of the present invention can be used as a marker or detector of a particular disease or disorder related to the endocrine system and/or hormone imbalance.

[0510] Endocrine system and/or hormone imbalance and/or diseases encompass disorders of uterine motility including, but not limited to: complications with pregnancy and labor (e.g., pre-term labor, post-term pregnancy, spontaneous abortion, and slow or stopped labor); and disorders and/or diseases of the menstrual cycle (e.g., dysmenorrhea and endometriosis).

[0511] Endocrine system and/or hormone imbalance disorders and/or diseases include disorders and/or diseases of the pancreas, such as, for example, diabetes mellitus, diabetes insipidus, congenital pancreatic agenesis, pheochromocytoma—islet cell tumor syndrome; disorders and/or diseases of the adrenal glands such as, for example, Addison's Disease, corticosteroid deficiency, virilizing disease, hirsutism, Cushing's Syndrome, hyperaldosteronism, pheochromocytoma; disorders and/or diseases of the pituitary gland, such as, for example, hyperpituitarism, hypopituitarism, pituitary dwarfism, pituitary adenoma, panhypopituitarism, acromegaly, gigantism; disorders and/or diseases of the thyroid, including but not limited to, hyperthyroidism, hypothyroidism, Plummer's disease, Graves' disease (toxic diffuse goiter), toxic nodular goiter, thyroiditis (Hashimoto's thyroiditis, subacute granulomatous thyroiditis, and silent lymphocytic thyroiditis), Pendred's syndrome, myxedema, cretinism, thyrotoxicosis, thyroid hormone coupling defect, thymic aplasia, Hurthle cell tumours of the thyroid, thyroid cancer, thyroid carcinoma, Medullary thyroid carcinoma; disorders and/or diseases of the parathyroid, such as, for example, hyperparathyroidism, hypoparathyroidism; disorders and/or diseases of the hypothalamus.

[0512] In addition, endocrine system and/or hormone imbalance disorders and/or diseases may also include disorders and/or diseases of the testes or ovaries, including cancer. Other disorders and/or diseases of the testes or ovaries further include, for example, ovarian cancer, polycystic ovary syndrome, Klinefelter's syndrome, vanishing testes syndrome (bilateral anorchia), congenital absence of Leydig's cells, cryptorchidism, Noonan's syndrome, myotonic dystrophy, capillary haemangioma of the testis (benign), neoplasias of the testis and neo-testis.

[0513] Moreover, endocrine system and/or hormone imbalance disorders and/or diseases may also include disorders and/or diseases such as, for example, polyglandular deficiency syndromes, pheochromocytoma, neuroblastoma, multiple Endocrine neoplasia, and disorders and/or cancers of endocrine tissues.

[0514] Immune Activity

[0515] Polynucleotides, polypeptides, antibodies, and/or agonists or antagonists of the present invention may be useful in treating, preventing, diagnosing and/or prognosing diseases, disorders, and/or conditions of the immune system, by, for example, activating or inhibiting the proliferation, differentiation, or mobilization (chemotaxis) of immune cells. Immune cells develop through a process called hematopoiesis, producing myeloid (platelets, red blood cells, neutrophils, and macrophages) and lymphoid (B and T lymphocytes) cells from pluripotent stem cells. The etiology of these immune diseases, disorders, and/or conditions may be genetic, somatic, such as cancer and some autoimmune diseases, acquired (e.g., by chemotherapy or toxins), or infectious. Moreover, polynucleotides, polypeptides, antibodies, and/or agonists or antagonists of the present invention can be used as a marker or detector of a particular immune system disease or disorder.

[0516] In another embodiment, a polypeptide of the invention, or polynucleotides, antibodies, agonists, or antagonists corresponding to that polypeptide, may be used to treat diseases and disorders of the immune system and/or to inhibit or enhance an immune response generated by cells associated with the tissue(s) in which the polypeptide of the invention is expressed, including one, two, three, four, five, or more tissues disclosed in Table 1A, column 7 (Tissue Distribution Library Code).

[0517] Polynucleotides, polypeptides, antibodies, and/or agonists or antagonists of the present invention may be useful in treating, preventing, diagnosing, and/or prognosing immunodeficiencies, including both congenital and acquired immunodeficiencies. Examples of B cell immunodeficiencies in which immunoglobulin levels B cell function and/or B cell numbers are decreased include: X-linked agammaglobulinemia (Bruton's disease), X-linked infantile agammaglobulinemia, X-linked immunodeficiency with hyper IgM, non X-linked immunodeficiency with hyper IgM, X-linked lymphoproliferative syndrome (XLP), agammaglobulinemia including congenital and acquired agammaglobulinemia, adult onset agammaglobulinemia, late-onset agammaglobulinemia, dysgammaglobulinemia, hypogammaglobulinemia, unspecified hypogammaglobulinemia, recessive agammaglobulinemia (Swiss type), Selective IgM deficiency, selective IgA deficiency, selective IgG subclass deficiencies, IgG subclass deficiency (with or without IgA deficiency), Ig deficiency with increased IgM, IgG and IgA deficiency with increased IgM, antibody deficiency with normal or elevated Igs, Ig heavy chain deletions, kappa chain deficiency, B cell lymphoproliferative disorder (BLPD), common variable immunodeficiency (CVID), common variable immunodeficiency (CVI) (acquired), and transient hypogammaglobutinemia of infancy.

[0518] In specific embodiments, ataxia-telangiectasia or conditions associated with ataxia-telangiectasia are treated, prevented, diagnosed, and/or prognosing using the polypeptides or polynucleotides of the invention, and/or agonists or antagonists thereof.

[0519] Examples of congenital immunodeficiencies in which T cell and/or B cell function and/or number is decreased include, but are not limited to: DiGeorge anomaly, severe combined immunodeficiencies (SCID) (including, but not limited to, X-linked SCID, autosomal recessive SCID, adenosine deaminase deficiency, purine nucleoside phosphorylase (PNP) deficiency, Class II MHC deficiency (Bare lymphocyte syndrome), Wiskott-Aldrich syndrome, and ataxia telangiectasia), thymic hypoplasia, third and fourth pharyngeal pouch syndrome, 22q11.2 deletion, chronic mucocutaneous-candidiasis, natural killer cell deficiency (NK), idiopathic CD4+ T-lymphocytopenia, immunodeficiency with predominant T cell defect (unspecified), and unspecified immunodeficiency of cell mediated immunity.

[0520] In specific embodiments, DiGeorge anomaly or conditions associated with DiGeorge anomaly are treated, prevented, diagnosed, and/or prognosed using polypeptides or polynucleotides of the invention, or antagonists or agonists thereof.

[0521] Other immunodeficiencies that may be treated, prevented, diagnosed, and/or prognosed using polypeptides or polynucleotides of the invention, and/or agonists or antagonists thereof, include, but are not limited to, chronic granulomatous disease, Chediak-Higashi syndrome, myeloperoxidase deficiency, leukocyte glucose-6-phosphate dehydrogenase deficiency, X-linked lymphoproliferative syndrome (XLP), leukocyte adhesion deficiency, complement component deficiencies (including C1, C2, C3, C4, C5, C6, C7, C8 and/or C9 deficiencies), reticular dysgenesis, thymic alymphoplasia-aplasia, immunodeficiency with thymoma, severe congenital leukopenia, dysplasia with immunodeficiency, neonatal neutropenia, short limbed dwarfism, and Nezelof syndrome-combined immunodeficiency with Igs.

[0522] In a preferred embodiment, the immunodeficiencies and/or conditions associated with the immunodeficiencies recited above are treated, prevented, diagnosed and/or prognosed using polynucleotides, polypeptides, antibodies, and/or agonists or antagonists of the present invention.

[0523] In a preferred embodiment polynucleotides, polypeptides, antibodies, and/or agonists or antagonists of the present invention could be used as an agent to boost immunoresponsiveness among immunodeficient individuals. In specific embodiments, polynucleotides, polypeptides, antibodies, and/or agonists or antagonists of the present invention could be used as an agent to boost immunoresponsiveness among B cell and/or T cell immunodeficient individuals.

[0524] The polynucleotides, polypeptides, antibodies, and/or agonists or antagonists of the present invention may be useful in treating, preventing, diagnosing and/or prognosing autoimmune disorders. Many autoimmune disorders result from inappropriate recognition of self as foreign material by immune cells. This inappropriate recognition results in an immune response leading to the destruction of the host tissue. Therefore, the administration of polynucleotides and polypeptides of the invention that can inhibit an immune response, particularly the proliferation, differentiation, or chemotaxis of T-cells, may be an effective therapy in preventing autoimmune disorders.

[0525] Autoimmune diseases or disorders that may be treated, prevented, diagnosed and/or prognosed by polynucleotides, polypeptides, antibodies, and/or agonists or antagonists of the present invention include, but are not limited to, one or more of the following: systemic lupus erythematosus, rheumatoid arthritis, ankylosing spondylitis, multiple sclerosis, autoimmune thyroiditis, Hashimoto's thyroiditis, autoimmune hemolytic anemia, hemolytic anemia, thrombocytopenia, autoimmune thrombocytopenia purpura, autoimmune neonatal thrombocytopenia, idiopathic thrombocytopenia purpura, purpura (e.g., Henloch-Scoenlein purpura), autoimmunocytopenia, Goodpasture's syndrome, Pemphigus vulgaris, myasthenia gravis, Grave's disease (hyperthyroidism), and insulin-resistant diabetes mellitus.

[0526] Additional disorders that are likely to have an autoimmune component that may be treated, prevented, and/or diagnosed with the compositions of the invention include, but are not limited to, type II collagen-induced arthritis, antiphospholipid syndrome, dermatitis, allergic encephalomyelitis, myocarditis, relapsing polychondritis, rheumatic heart disease, neuritis, uveitis ophthalmia, polyendocrinopathies, Reiter's Disease, Stiff-Man Syndrome, autoimmune pulmonary inflammation, autism, Guillain-Barre Syndrome, insulin dependent diabetes mellitus, and autoimmune inflammatory eye disorders.

[0527] Additional disorders that are likely to have an autoimmune component that may be treated, prevented, diagnosed and/or prognosed with the compositions of the invention include, but are not limited to, scleroderma. with anti-collagen antibodies (often characterized, e.g., by nucleolar and other nuclear antibodies), mixed connective tissue disease (often characterized, e.g., by antibodies to extractable nuclear antigens (e.g., ribonucleoprotein)), polymyositis (often characterized, e.g., by nonhistone ANA), pernicious anemia (often characterized, e.g., by antiparietal cell, microsomes, and intrinsic factor antibodies), idiopathic Addison's disease (often characterized, e.g., by humoral and cell-mediated adrenal cytotoxicity, infertility (often characterized, e.g., by antispermatozoal antibodies), glomerulonephritis (often characterized, e.g., by glomerular basement membrane antibodies or immune complexes), bullous pemphigoid (often characterized, e.g., by IgG and complement in basement membrane), Sjogren's syndrome (often characterized, e.g., by multiple tissue antibodies, and/or a specific nonhistone ANA (SS-B)), diabetes mellitus (often characterized, e.g., by cell-mediated and humoral islet cell antibodies), and adrenergic drug resistance (including adrenergic drug resistance with asthma or cystic fibrosis) (often characterized, e.g., by beta-adrenergic receptor antibodies).

[0528] Additional disorders that may have an autoimmune component that may be treated, prevented, diagnosed and/or prognosed with the compositions of the invention include, but are not limited to, chronic active hepatitis (often characterized, e.g., by smooth muscle antibodies), primary biliary cirrhosis (often characterized, e.g., by mitochondria antibodies), other endocrine gland failure (often characterized, e.g., by specific tissue antibodies in some cases), vitiligo (often characterized, e.g., by melanocyte antibodies), vasculitis (often characterized, e.g., by Ig and complement in vessel walls and/or low serum complement), post-MI (often characterized, e.g., by myocardial antibodies), cardiotomy syndrome (often characterized, e.g., by myocardial antibodies), urticaria (often characterized, e.g., by IgG and IgM antibodies to IgE), atopic dermatitis (often characterized, e.g., by IgG and IgM antibodies to IgE), asthma (often characterized, e.g., by IgG and IgE), antibodies to IgE), and many other inflammatory, granulomatous, degenerative, and atrophic disorders.

[0529] In a preferred embodiment, the autoimmune diseases and disorders and/or conditions associated with the diseases and disorders recited above are treated, prevented, diagnosed and/or prognosed using for example, antagonists or agonists, polypeptides or polynucleotides, or antibodies of the present invention. In a specific preferred embodiment, rheumatoid arthritis is treated, prevented, and/or diagnosed using polynucleotides, polypeptides, antibodies, and/or agonists or antagonists of the present invention.

[0530] In another specific preferred embodiment, systemic lupus erythematosus is treated, prevented, and/or diagnosed using polynucleotides, polypeptides, antibodies, and/or agonists or antagonists of the present invention. In another specific preferred embodiment, idiopathic thrombocytopenia purpura is treated, prevented, and/or diagnosed using polynucleotides, polypeptides, antibodies, and/or agonists or antagonists of the present invention.

[0531] In another specific preferred embodiment IgA nephropathy is treated, prevented, and/or diagnosed using polynucleotides, polypeptides, antibodies, and/or agonists or antagonists of the present invention.

[0532] In a preferred embodiment, the autoimmune diseases and disorders and/or conditions associated with the diseases and disorders recited above are treated, prevented, diagnosed and/or prognosed using polynucleotides, polypeptides, antibodies, and/or agonists or antagonists of the present invention.

[0533] In preferred embodiments, polypeptides, antibodies, polynucleotides and/or agonists or antagonists of the present invention are used as a immunosuppressive agent(s).

[0534] Polynucleotides, polypeptides, antibodies, and/or agonists or antagonists of the present invention may be useful in treating, preventing, prognosing, and/or diagnosing diseases, disorders, and/or conditions of hematopoietic cells. Polynucleotides, polypeptides, antibodies, and/or agonists or antagonists of the present invention could be used to increase differentiation and proliferation of hematopoietic cells, including the pluripotent stem cells, in an effort to treat or prevent those diseases, disorders, and/or conditions associated with a decrease in certain (or many) types hematopoietic cells, including but not limited to, leukopenia, neutropenia, anemia, and thrombocytopenia. Alternatively, Polynucleotides, polypeptides, antibodies, and/or agonists or antagonists of the present invention could be used to increase differentiation and proliferation of hematopoietic cells, including the pluripotent stem cells, in an effort to treat or prevent those diseases, disorders, and/or conditions associated with an increase in certain (or many) types of hematopoietic cells, including but not limited to, histiocytosis.

[0535] Allergic reactions and conditions, such as asthma (particularly allergic asthma) or other respiratory problems, may also be treated, prevented, diagnosed and/or prognosed using polypeptides, antibodies, or polynucleotides of the invention, and/or agonists or antagonists thereof. Moreover, these molecules can be used to treat, prevent, prognose, and/or diagnose anaphylaxis, hypersensitivity to an antigenic molecule, or blood group incompatibility.

[0536] Additionally, polypeptides or polynucleotides of the invention, and/or agonists or antagonists thereof, may be used to treat, prevent, diagnose and/or prognose IgE-mediated allergic reactions. Such allergic reactions include, but are not limited to, asthma, rhinitis, and eczema. In specific embodiments, polynucleotides, polypeptides, antibodies, and/or agonists or antagonists of the present invention may be used to modulate IgE concentrations in vitro or in vivo.

[0537] Moreover, polynucleotides, polypeptides, antibodies, and/or agonists or antagonists of the present invention have uses in the diagnosis, prognosis, prevention, and/or treatment of inflammatory conditions. For example, since polypeptides, antibodies, or polynucleotides of the invention, and/or agonists or antagonists of the invention may inhibit the activation, proliferation and/or differentiation of cells involved in an inflammatory response, these molecules can be used to prevent and/or treat chronic and acute inflammatory conditions. Such inflammatory conditions include, but are not limited to, for example, inflammation associated with infection (e.g., septic shock, sepsis, or systemic inflammatory response syndrome), ischemia-reperfusion injury, endotoxin lethality, complement-mediated hyperacute rejection, nephritis, cytokine or chemokine induced lung injury, inflammatory bowel disease, Crohn's disease, over production of cytokines (e.g., TNF or IL-1.), respiratory disorders (e.g., asthma and allergy); gastrointestinal disorders (e.g., inflammatory bowel disease); cancers (e.g., gastric, ovarian, lung, bladder, liver, and breast); CNS disorders (e.g., multiple sclerosis; ischemic brain injury and/or stroke, traumatic brain injury, neurodegenerative disorders (e.g., Parkinson's disease and Alzheimer's disease); AIDS-related dementia; and prion disease); cardiovascular disorders (e.g., atherosclerosis, myocarditis, cardiovascular disease, and cardiopulmonary bypass complications); as well as many additional diseases, conditions, and disorders that are characterized by inflammation (e.g., hepatitis, rheumatoid arthritis, gout, trauma, pancreatitis, sarcoidosis, dermatitis, renal ischemia-reperfusion injury, Grave's disease, systemic lupus erythematosus, diabetes mellitus, and allogenic transplant rejection).

[0538] Because inflammation is a fundamental defense mechanism, inflammatory disorders can effect virtually any tissue of the body. Accordingly, polynucleotides, polypeptides, and antibodies of the invention, as well as agonists or antagonists thereof, have uses in the treatment of tissue-specific inflammatory disorders, including, but not limited to, adrenalitis, alveolitis, angiocholecystitis, appendicitis, balanitis, blepharitis, bronchitis, bursitis, carditis, cellulitis, cervicitis, cholecystitis, chorditis, cochlitis, colitis, conjunctivitis, cystitis, dermatitis, diverticulitis, encephalitis, endocarditis, esophagitis, eustachitis, fibrositis, folliculitis, gastritis, gastroenteritis, gingivitis, glossitis, hepatosplenitis, keratitis, labyrinthitis, laryngitis, lymphangitis, mastitis, media otitis, meningitis, metritis, mucitis, myocarditis, myosititis, myringitis, nephritis, neuritis, orchitis, osteochondritis, otitis, pericarditis, peritendonitis, peritonitis, pharyngitis, phlebitis, poliomyelitis; prostatitis, pulpitis, retinitis, rhinitis, salpingitis, scleritis, sclerochoroiditis, scrotitis, sinusitis, spondylitis, steatitis, stomatitis, synovitis, syringitis, tendonitis, tonsillitis, urethritis, and vaginitis.

[0539] In specific embodiments, polypeptides, antibodies, or polynucleotides of the invention, and/or agonists or antagonists thereof, are useful to diagnose, prognose, prevent, and/or treat organ transplant rejections and graft-versus-host disease. Organ rejection occurs by host immune cell destruction of the transplanted tissue through an immune response. Similarly, an immune response is also involved in GVHD, but, in this case, the foreign transplanted immune cells destroy the host tissues. Polypeptides, antibodies, or polynucleotides of the invention, and/or agonists or antagonists thereof, that inhibit an immune response, particularly the activation, proliferation, differentiation, or chemotaxis of T-cells, may be an effective therapy in preventing organ rejection or GVHD. In specific embodiments, polypeptides, antibodies, or polynucleotides of the invention, and/or agonists or antagonists thereof, that inhibit an immune response, particularly the activation, proliferation, differentiation, or chemotaxis of T-cells, may be an effective therapy in preventing experimental allergic and hyperacute xenograft rejection.

[0540] In other embodiments, polypeptides, antibodies, or polynucleotides of the invention, and/or agonists or antagonists thereof, are useful to diagnose, prognose, prevent, and/or treat immune complex diseases, including, but not limited to, serum sickness, post streptococcal glomerulonephritis, polyarteritis nodosa, and immune complex-induced vasculitis.

[0541] Polypeptides, antibodies, polynucleotides and/or agonists or antagonists of the invention can be used to treat, detect, and/or prevent infectious agents. For example, by increasing the immune response, particularly increasing the proliferation activation and/or differentiation of B and/or T cells, infectious diseases may be treated, detected, and/or prevented. The immune response may be increased by either enhancing an existing immune response, or by initiating a new immune response. Alternatively, polynucleotides, polypeptides, antibodies, and/or agonists or antagonists of the present invention may also directly inhibit the infectious agent (refer to section of application listing infectious agents, etc), without necessarily eliciting an immune response.

[0542] In another embodiment, polypeptides, antibodies, polynucleotides and/or agonists or antagonists of the present invention are used as a vaccine adjuvant that enhances immune responsiveness to an antigen. In a specific embodiment, polypeptides, antibodies, polynucleotides and/or agonists or antagonists of the present invention are used as an adjuvant to enhance tumor-specific immune responses.

[0543] In another specific embodiment, polypeptides, antibodies, polynucleotides and/or agonists or antagonists of the present invention are used as an adjuvant to enhance anti-viral immune responses. Anti-viral immune responses that may be enhanced using the compositions of the invention as an adjuvant, include virus and virus associated diseases or symptoms described herein or otherwise known in the art. In specific embodiments, the compositions of the invention are used as an adjuvant to enhance an immune response to a virus, disease, or symptom selected from the group consisting of: AIDS, meningitis, Dengue, EBV, and hepatitis (e.g., hepatitis B). In another specific embodiment, the compositions of the invention are used as an adjuvant to enhance an immune response to a virus, disease, or symptom selected from the group consisting of: HIV/AIDS, respiratory syncytial virus, Dengue, rotavirus, Japanese B encephalitis, influenza A and B, parainfluenza, measles, cytomegalovirus, rabies, Junin, Chikungunya, Rift Valley Fever, herpes simplex, and yellow fever.

[0544] In another specific embodiment, polypeptides, antibodies, polynucleotides and/or agonists or antagonists of the present invention are used as an adjuvant to enhance anti-bacterial or anti-fungal immune responses. Anti-bacterial or anti-fungal immune responses that may be enhanced using the compositions of the invention as an adjuvant, include bacteria or fungus and bacteria or fungus associated diseases or symptoms described herein or otherwise known in the art. In specific embodiments, the compositions of the invention are used as an adjuvant to enhance an immune response to a bacteria or fungus, disease, or symptom selected from the group consisting of: tetanus, Diphtheria, botulism, and meningitis type B.

[0545] In another specific embodiment, the compositions of the invention are used as an adjuvant to enhance an immune response to a bacteria or fungus, disease, or symptom selected from the group consisting of. Vibrio cholerae, Mycobacterium leprae, Salmonella typhi, Salmonella paratyphi, Meisseria meningitidis, Streptococcus pneumoniae, Group B streptococcus, Shigella spp., Enterotoxigenic Escherichia coli, Enterohemorrhagic E. coli, and Borrelia burgdorferi.

[0546] In another specific embodiment, polypeptides, antibodies, polynucleotides and/or agonists or antagonists of the present invention are used as an adjuvant to enhance anti-parasitic immune responses. Anti-parasitic immune responses that may be enhanced using the compositions of the invention as an adjuvant, include parasite and parasite associated diseases or symptoms described herein or otherwise known in the art. In specific embodiments, the compositions of the invention are used as an adjuvant to enhance an immune response to a parasite. In another specific embodiment, the compositions of the invention are used as an adjuvant to enhance an immune response to Plasmodium (malaria) or Leishmania.

[0547] In another specific embodiment, polypeptides, antibodies, polynucleotides and/or agonists or antagonists of the present invention may also be employed to treat infectious diseases including silicosis, sarcoidosis, and idiopathic pulmonary fibrosis; for example, by preventing the recruitment and activation of mononuclear phagocytes.

[0548] In another specific embodiment, polypeptides, antibodies, polynucleotides and/or agonists or antagonists of the present invention are used as an antigen for the generation of antibodies to inhibit or enhance immune mediated responses against polypeptides of the invention.

[0549] In one embodiment, polypeptides, antibodies, polynucleotides and/or agonists or antagonists of the present invention are administered to an animal (e.g., mouse, rat, rabbit, hamster, guinea pig, pigs, micro-pig, chicken, camel, goat, horse, cow, sheep, dog, cat, non-human primate, and human, most preferably human) to boost the immune system to produce increased quantities of one or more antibodies (e.g., IgG, IgA, IgM, and IgE), to induce higher affinity antibody production and immunoglobulin class switching (e.g., IgG, IgA, IgM, and IgE), and/or to increase an immune response.

[0550] In another specific embodiment, polypeptides, antibodies, polynucleotides and/or agonists or antagonists of the present invention are used as a stimulator of B cell responsiveness to pathogens.

[0551] In another specific embodiment, polypeptides, antibodies, polynucleotides and/or agonists or antagonists of the present invention are used as an activator of T cells.

[0552] In another specific embodiment, polypeptides, antibodies, polynucleotides and/or agonists or antagonists of the present invention are used as an agent that elevates the immune status of an individual prior to their receipt of immunosuppressive therapies.

[0553] In another specific embodiment, polypeptides, antibodies, polynucleotides and/or agonists or antagonists of the present invention are used as an agent to induce higher affinity antibodies.

[0554] In another specific embodiment, polypeptides, antibodies, polynucleotides and/or agonists or antagonists of the present invention are used as an agent to increase serum immunoglobulin concentrations.

[0555] In another specific embodiment, polypeptides, antibodies, polynucleotides and/or agonists or antagonists of the present invention are used as an agent to accelerate recovery of immunocompromised individuals.

[0556] In another specific embodiment, polypeptides, antibodies, polynucleotides and/or agonists or antagonists of the present invention are used as an agent to boost immunoresponsiveness among aged populations and/or neonates.

[0557] In another specific embodiment, polypeptides, antibodies, polynucleotides and/or agonists or antagonists of the present invention are used as an immune system enhancer prior to, during, or after-bone marrow transplant and/or other transplants (e.g., allogeneic or xenogeneic organ transplantation). With respect to transplantation, compositions of the invention may be administered prior to, concomitant with, and/or after transplantation. In a specific embodiment, compositions of the invention are administered after transplantation, prior to the beginning of recovery of T-cell populations. In another specific embodiment, compositions of the invention are first administered after transplantation after the beginning of recovery of T cell populations, but prior to full recovery of B cell populations.

[0558] In another specific embodiment, polypeptides, antibodies, polynucleotides arid/or agonists or antagonists of the present invention are used as an agent to boost immunoresponsiveness among individuals having an acquired loss of B cell function. Conditions resulting in an acquired loss of B cell function that may be ameliorated or treated by administering the polypeptides, antibodies, polynucleotides and/or agonists or antagonists thereof, include, but are not limited to, HIV Infection, AIDS, bone marrow transplant, and B cell chronic lymphocytic leukemia (CLL).

[0559] In another specific embodiment, polypeptides, antibodies, polynucleotides and/or agonists or antagonists of the present invention are used as an agent to boost immunoresponsiveness among individuals-having a temporary immune deficiency. Conditions resulting in a temporary immune deficiency that may be ameliorated or treated by administering the polypeptides, antibodies, polynucleotides and/or agonists or antagonists thereof, include, but are not limited to, recovery from viral infections (e.g., influenza), conditions associated with malnutrition, recovery from infectious mononucleosis, or conditions associated with stress, recovery from measles, recovery from blood transfusion, and recovery from surgery.

[0560] In another specific embodiment, polypeptides, antibodies, polynucleotides and/or agonists or antagonists of the present invention are used as a regulator of antigen presentation by monocytes, dendritic cells, and/or B-cells. In one embodiment, polynucleotides, polypeptides, antibodies, and/or agonists or antagonists of the present invention enhance antigen presentation or antagonizes antigen presentation in vitro or in vivo. Moreover, in related embodiments, said enhancement or antagonism of antigen presentation may be useful as an anti-tumor treatment or to modulate the immune system.

[0561] In another specific embodiment, polypeptides, antibodies, polynucleotides and/or agonists or antagonists of the present invention are used as an agent to direct an individual's immune system towards development of a humoral response (i.e. TH2) as opposed to a TH1 cellular response.

[0562] In another specific embodiment, polypeptides, antibodies, polynucleotides and/or agonists or antagonists of the present invention are used as a means to induce tumor proliferation and thus make it more susceptible to anti-neoplastic agents. For example, multiple myeloma is a slowly dividing disease and is thus refractory to virtually all anti-neoplastic regimens. If these cells were forced to proliferate more rapidly their susceptibility profile would likely change.

[0563] In another specific embodiment, polypeptides, antibodies, polynucleotides and/or agonists or antagonists of the present invention are used as a stimulator of B cell production in pathologies such as AIDS, chronic lymphocyte disorder and/or Common Variable Immunodificiency.

[0564] In another specific embodiment, polypeptides, antibodies, polynucleotides and/or agonists or antagonists of the present invention are used as a therapy for generation and/or regeneration of lymphoid tissues following surgery, trauma or genetic defect. In another specific embodiment, polypeptides, antibodies, polynucleotides and/or agonists or antagonists of the present invention are used in the pretreatment of bone marrow samples prior to transplant.

[0565] In another specific embodiment, polypeptides, antibodies, polynucleotides and/or agonists or antagonists of the present invention are used as a gene-based therapy for genetically inherited disorders resulting in immuno-incompetence/immunodeficiency such as observed among SCID patients.

[0566] In another specific embodiment, polypeptides, antibodies, polynucleotides and/or agonists or antagonists of the present invention are used as a means of activating monocytes/macrophages to defend against parasitic diseases that effect monocytes such as Leishmania.

[0567] In another specific embodiment, polypeptides, antibodies, polynucleotides and/or agonists or antagonists of the present invention are used as a means of regulating secreted cytokines that are elicited by polypeptides of the invention.

[0568] In another embodiment, polypeptides, antibodies, polynucleotides and/or agonists or antagonists of the present invention are used in one or more of the applications decribed herein, as they may apply to veterinary medicine.

[0569] In another specific embodiment, polypeptides, antibodies, polynucleotides and/or agonists or antagonists of the present invention are used as a means of blocking various aspects of immune responses to foreign agents or self. Examples of diseases or conditions in which blocking of certain aspects of immune responses may be desired include autoimmune disorders such as lupus, and arthritis, as well as immunoresponsiveness to skin allergies, inflammation, bowel disease, injury and diseases/disorders associated with pathogens.

[0570] In another specific embodiment, polypeptides, antibodies, polynucleotides and/or agonists or antagonists of the present invention are used as a therapy for preventing the B cell proliferation and Ig secretion associated with autoimmune diseases such as idiopathic thrombocytopenic purpura, systemic lupus erythematosus and multiple sclerosis.

[0571] In another specific embodiment, polypeptides, antibodies, polynucleotides and/or agonists or antagonists of the present invention are used as a inhibitor of B and/or T cell migration in endothelial cells. This activity disrupts tissue architecture or cognate responses and is useful, for example in disrupting immune responses, and blocking sepsis.

[0572] In another specific embodiment, polypeptides, antibodies, polynucleotides and/or agonists or antagonists of the present invention are used as a therapy for chronic hypergammaglobulinemia evident in such diseases as monoclonal gammopathy of undetermined significance (MGUS), Waldenstrom's disease, related idiopathic monoclonal gammopathies, and plasmacytomas.

[0573] In another specific embodiment, polypeptides, antibodies, polynucleotides and/or agonists or antagonists of the present invention may be employed for instance to inhibit polypeptide chemotaxis and activation of macrophages and their precursors, and of neutrophils, basophils, B lymphocytes and some T-cell subsets, e.g., activated and CD8 cytotoxic T cells and natural killer cells, in certain autoimmune and chronic inflammatory and infective diseases. Examples of autoimmune diseases are described herein and include multiple sclerosis, and insulin-dependent diabetes.

[0574] The polypeptides, antibodies, polynucleotides and/or agonists or antagonists of the present invention may also be employed to treat idiopathic hyper-eosinophilic syndrome by, for example, preventing eosinophil production and migration.

[0575] In another specific embodiment, polypeptides, antibodies, polynucleotides and/or agonists or antagonists of the present invention are used to enhance or inhibit complement mediated cell lysis.

[0576] In another specific embodiment, polypeptides, antibodies, polynucleotides and/or agonists or antagonists of the present invention are used to enhance or inhibit antibody dependent cellular cytotoxicity.

[0577] In another specific embodiment, polypeptides, antibodies, polynucleotides and/or agonists or antagonists of the present invention may also be employed for treating atherosclerosis, for example, by preventing monocyte infiltration in the artery

[0578] In another specific embodiment, polypeptides, antibodies, polynucleotides and/or agonists or antagonists of the present invention may be employed to treat adult respiratory distress syndrome (ARDS).

[0579] In another specific embodiment, polypeptides, antibodies, polynucleotides and/or agonists or antagonists of the present invention may be useful for stimulating wound and tissue repair, stimulating angiogenesis, and/or stimulating the repair of vascular or lymphatic diseases or disorders. Additionally, agonists and antagonists of the invention may be used to stimulate the regeneration of mucosal surfaces.

[0580] In a specific embodiment, polynucleotides or polypeptides, and/or agonists thereof are used to diagnose, prognose, treat, and/or prevent a disorder characterized by primary or acquired immunodeficiency, deficient serum immunoglobulin production, recurrent infections, and/or immune system dysfunction. Moreover, polynucleotides or polypeptides, and/or agonists thereof may be used to treat or prevent infections of the joints, bones, skin, and/or parotid glands, blood-borne infections (e.g., sepsis, meningitis, septic arthritis, and/or osteomyelitis), autoimmune diseases (e.g., those disclosed herein), inflammatory disorders, and malignancies, and/or any disease or disorder or condition associated with these infections, diseases, disorders and/or malignancies) including, but not limited to, CVID, other primary immune deficiencies, HIV disease, CLL, recurrent bronchitis, sinusitis, otitis media, conjunctivitis, pneumonia, hepatitis, meningitis, herpes zoster (e.g., severe herpes zoster), and/or pneumocystis carnii. Other diseases and disorders that may be prevented, diagnosed, prognosed, and/or treated with polynucleotides or polypeptides, and/or agonists of the present invention include, but are not limited to, HIV infection, HTLV-BLV infection, lymphopenia, phagocyte bactericidal dysfunction anemia, thrombocytopenia, and hemoglobinuria.

[0581] In another embodiment, polynucleotides, polypeptides, antibodies, and/or agonists or antagonists of the present invention are used to treat, and/or diagnose an individual having common variable immunodeficiency disease (“CVID”; also known as “acquired agammaglobulinemia” and “acquired hypogammaglobulinemia”) or a subset of this disease.

[0582] In a specific embodiment, polynucleotides, polypeptides, antibodies, and/or agonists or antagonists of the present invention may be used to diagnose, prognose, prevent, and/or treat cancers or neoplasms including immune cell or immune tissue-related cancers or neoplasms. Examples of cancers or neoplasms that may be prevented, diagnosed, or treated by polynucleotides, polypeptides, antibodies, and/or agonists or antagonists of the present invention include, but are not limited to, acute myelogenous leukemia, chronic myelogenous leukemia, Hodgkin's disease, non-Hodgkin's lymphoma, acute lymphocytic anemia (ALL) Chronic lymphocyte leukemia, plasmacytomas, multiple myeloma, Burkitt's lymphoma, EBV-transformed diseases, and/or diseases and disorders described in the section entitled “Hyperproliferative Disorders” elsewhere herein.

[0583] In another specific embodiment, polypeptides, antibodies, polynucleotides and/or agonists or antagonists of the present invention are used as a therapy for decreasing cellular proliferation of Large B-cell Lymphomas.

[0584] In another specific embodiment, polypeptides, antibodies, polynucleotides and/or agonists or antagonists of the present invention are used as a means of decreasing the involvement of B cells and Ig associated with Chronic Myelogenous Leukemia.

[0585] In specific embodiments, the compositions of the invention are used as an agent to boost immunoresponsiveness among B cell immunodeficient individuals, such as, for example, an individual who has undergone a partial or complete splenectomy.

[0586] Antagonists of the invention include, for example, binding and/or inhibitory antibodies, antisense nucleic acids, ribozymes or soluble forms of the polypeptides of the present invention (e.g., Fc fusion protein; see, e.g., Example 9). Agonists of the invention include, for example, binding or stimulatory antibodies, and soluble forms of the polypeptides (e.g., Fc fusion proteins; see, e.g., Example 9). polypeptides, antibodies, polynucleotides and/or agonists or antagonists of the present invention may be employed in a composition with a pharmaceutically acceptable carrier, e.g., as described herein.

[0587] In another embodiment, polypeptides, antibodies, polynucleotides and/or agonists or antagonists of the present invention are administered to an animal (including, but not limited to, those listed above, and also including transgenic animals) incapable of producing functional endogenous antibody molecules or having an otherwise compromised endogenous immune system, but which is capable of producing human immunoglobulin molecules by means of a reconstituted or partially reconstituted immune system from another animal (see, e.g., published PCT Application Nos. WO98/24893, WO/9634096, WO/9633735, and WO/9110741). Administration of polypeptides, antibodies, polynucleotides and/or agonists or antagonists of the present invention to such animals is useful for the generation of monoclonal antibodies against the polypeptides, antibodies, polynucleotides and/or agonists or antagonists of the present invention.

[0588] Blood-Related Disorders

[0589] The polynucleotides, polypeptides, antibodies, and/or agonists or antagonists of the present invention may be used to modulate hemostatic (the stopping of bleeding) or thrombolytic (clot dissolving) activity. For example, by increasing hemostatic or thrombolytic activity, polynucleotides or polypeptides, and/or agonists or antagonists of the present invention could be used to treat or prevent blood coagulation diseases, disorders, and/or conditions (e.g., afibrinogenemia, factor deficiencies, hemophilia), blood platelet diseases, disorders, and/or conditions (e.g., thrombocytopenia), or wounds resulting from trauma, surgery, or other causes. Alternatively, polynucleotides, polypeptides, antibodies, and/or agonists or antagonists of the present invention that can decrease hemostatic or thrombolytic activity could be used to inhibit or dissolve clotting. These molecules could be important in the treatment or prevention of heart attacks (infarction), strokes, or scarring.

[0590] In specific embodiments, the polynucleotides, polypeptides, antibodies, and/or agonists or antagonists of the present invention may be used to prevent, diagnose, prognose, and/or treat thrombosis, arterial thrombosis, venous thrombosis, thromboembolism, pulmonary embolism, atherosclerosis, myocardial infarction, transient ischemic attack, unstable angina. In specific embodiments, the polynucleotides, polypeptides, antibodies, and/or agonists or antagonists of the present invention may be used for the prevention of occulsion of saphenous grafts, for reducing the risk of periprocedural thrombosis as might accompany angioplasty procedures, for reducing the risk of stroke in patients with atrial fibrillation including nonrheumatic atrial fibrillation, for reducing the risk of embolism associated with mechanical heart valves and or mitral valves disease. Other uses for the polynucleotides, polypeptides, antibodies, and/or agonists or antagonists of the present invention, include, but are not limited to, the prevention of occlusions in extrcorporeal devices (e.g., intravascular canulas, vascular access shunts in hemodialysis patients, hemodialysis machines, and cardiopulmonary bypass machines).

[0591] In another embodiment, a polypeptide of the invention, or polynucleotides, antibodies, agonists, or antagonists corresponding to that polypeptide, may be used to prevent, diagnose, prognose, and/or treat diseases and disorders of the blood and/or blood forming organs associated with the-tissue(s) in which the polypeptide of the invention is expressed, including one, two, three, four, five, or more tissues disclosed in Table 1A, column 7 (Tissue Distribution Library Code).

[0592] The polynucleotides, polypeptides, antibodies, and/or agonists or antagonists of the present invention may be used to modulate hematopoietic activity (the formation of blood cells). For example, the polynucleotides, polypeptides, antibodies, and/or agonists or antagonists of the present invention may be used to increase the quantity of all or subsets of blood cells, such as, for example, erythrocytes, lymphocytes (B or T cells), myeloid cells (e.g., basophils, eosinophils, neutrophils, mast cells, macrophages) and platelets. The ability to decrease the quantity of blood cells or subsets of blood cells may be useful in the prevention, detection, diagnosis and/or treatment of anemias and leukopenias described below. Alternatively,-the polynucleotides, polypeptides, antibodies, and/or agonists or antagonists of the present invention may be used to decrease the quantity of all or subsets of blood cells, such as, for example, erythrocytes, lymphocytes (B or T cells), myeloid cells (e.g., basophils, eosinoplils, neutrophils, mast cells, macrophages) and platelets. The ability to decrease the quantity of blood cells or subsets of blood cells may be useful in the prevention, detection, diagnosis and/or treatment of leukocytoses, such as, for example eosinophilia.

[0593] The polynucleotides, polypeptides, antibodies, and/or agonists or antagonists of the present invention may be used to prevent, treat, or diagnose blood dyscrasia.

[0594] Anemias are conditions in which the number of red blood cells or amount of hemoglobin (the protein that carries oxygen) in them is below normal. Anemia may be caused by excessive bleeding, decreased red blood cell production, or increased red blood cell destruction (hemolysis). The polynucleotides, polypeptides, antibodies, and/or agonists or antagonists of the present invention may be useful in treating, preventing, and/or diagnosing anemias. Anemias that may be treated prevented or diagnosed by the polynucleotides, polypeptides, antibodies, and/or agonists or antagonists of the present invention include iron deficiency anemia, hypochromic anemia, microcytic anemia, chlorosis, hereditary siderob;astic anemia, idiopathic acquired sideroblastic anemia, red cell aplasia, megaloblastic anemia (e.g., pernicious anemia, (vitamin Bt2 deficiency) and folic acid deficiency anemia), aplastic anemia, hemolytic anemias (e.g., autoimmune helolytic anemia, microangiopathic hemolytic anemia, and paroxysmal nocturnal hemoglobinuria). The polynucleotides, polypeptides, antibodies, and/or agonists or antagonists of the present invention may be useful in treating, preventing, and/or diagnosing anemias associated with diseases including but not limited to, anemias associated with systemic lupus erythematosus, cancers, lymphomas, chronic renal disease, and enlarged spleens. The polynucleotides, polypeptides, antibodies, and/or agonists or antagonists of the present invention may be useful in treating, preventing, and/or diagnosing anemias arising from drug treatments such as anemias associated with methyldopa, dapsone, and/or sulfadrugs. Additionally, rhe polynucleotides, polypeptides, antibodies, and/or agonists or antagonists of the present invention may be useful in treating, preventing, and/or diagnosing anemias associated with abnormal red blood cell architecture including but not limited to, hereditary spherocytosis, hereditary elliptocytosis, glucose-6-phosphate dehydrogenase deficiency, and sickle cell anemia.

[0595] The polynucleotides, polypeptides, antibodies, and/or agonists or antagonists of the present invention may be useful in treating, preventing, and/or diagnosing hemoglobin abnormalities, (e.g., those associated with sickle cell anemia, hemoglobin C disease, hemoglobin S-C disease, and hemoglobin E disease). Additionally, the polynucleotides, polypeptides, antibodies, and/or agonists or antagonists of the present invention may be useful in diagnosing, prognosing, preventing, and/or treating thalassemias, including, but not limited to major and minor forms of alpha-thalassemia and beta-thalassemia.

[0596] In another embodiment, the polynucleotides, polypeptides, antibodies, and/or agonists or antagonists of the present invention may be useful in diagnosing, prognosing, preventing, and/or treating bleeding disorders including, but not limited to, thrombocytopenia (e.g., idiopathic thrombocytopenic purpura, and thrombotic thrombocytopenic purpura), Von Willebrand's disease, hereditary platelet disorders (e.g., storage pool disease such as Chediak-Higashi and Hermansky-Pudlak syndromes, thromboxane A2 dysfunction, thromboasthenia, and Bernard-Soulier syndrome), hemolytic-uremic syndrome, hemophelias such as hemophelia A or Factor VII deficiency and Christmas disease or Factor IX deficiency, Hereditary Hemorhhagic Telangiectsia, also known as Rendu-Osler-Weber syndrome, allergic purpura (Henoch Schonlein purpura) and disseminated intravascular coagulation.

[0597] The effect of the polynucleotides, polypeptides, antibodies, and/or agonists or antagonists of the present invention on the clotting time of blood may be monitored using any of the clotting tests known in the art including, but not limited to, whole blood partial thromboplastin time (PTT), the activated partial thromboplastin time (aPTT), the activated clotting time (ACT), the recalcified activated clotting time, or the Lee-White Clotting time.

[0598] Several diseases and a variety of drugs can cause platelet dysfunction. Thus, in a specific embodiment, the polynucleotides, polypeptides, antibodies, and/or agonists or antagonists of the present invention may be useful in diagnosing, prognosing, preventing, and/or treating acquired platelet dysfunction such as platelet dysfunction accompanying kidney failure, leukemia, multiple myeloma, cirrhosis of the liver, and systemic lupus erythematosus as well as platelet dysfunction associated with drug treatments, including treatment with aspirin, ticlopidine, nonsteroidal anti-inflammatory drugs (used for arthritis, pain, and sprains), and penicillin in high doses.

[0599] In another embodiment, the polynucleotides, polypeptides, antibodies, and/or agonists or antagonists of the present invention may be useful in diagnosing, prognosing, preventing, and/or treating diseases and disorders characterized by or associated with increased or decreased numbers of white blood cells. Leukopenia occurs when the number of white blood cells decreases below normal. Leukopenias include, but are not limited to, neutropenia and lymphocytopenia. An increase in the number of white blood cells compared to normal is known as leukocytosis. The body generates increased numbers of white blood cells during infection. Thus, leukocytosis may simply be a normal physiological parameter that reflects infection. Alternatively, leukocytosis may be an indicator of injury or other disease such as cancer. Leokocytoses, include but are not limited to, eosinophilia, and accumulations of macrophages. In specific embodiments, the polynucleotides, polypeptides, antibodies, and/or agonists or antagonists of the present invention may be useful in diagnosing, prognosing, preventing, and/or treating leukopenia. In other specific embodiments, the polynucleotides, polypeptides, antibodies, and/or agonists or antagonists of the present invention may be useful in diagnosing, prognosing, preventing, and/or treating leukocytosis

[0600] Leukopenia may be a generalized decreased in all types of white blood cells, or may be a specific depletion of particular types of white blood cells. Thus, in specific embodiments, the polynucleotides, polypeptides, antibodies, and/or agonists or antagonists of the present invention may be useful in diagnosing, prognosing, preventing, and/or treating decreases in neutrophil numbers, known as neutropenia. Neutropenias that may be diagnosed, prognosed, prevented, and/or treated by the polynucleotides, polypeptides, antibodies, and/or agonists or antagonists of the present invention include, but are not limited to, infantile genetic agranulocytosis, familial neutropenia, cyclic neutropenia, neutropenias resulting from or associated with dietary deficiencies (e.g., vitamin B 12 deficiency or folic acid deficiency), neutropenias resulting from or associated with drug treatments (e.g., antibiotic regimens such as penicillin treatment, sulfonamide treatment, anticoagulant treatment, anticonvulsant drugs, anti-thyroid drugs, and cancer chemotherapy), and neutropenias resulting from increased neutrophil destruction that may occur in association with some bacterial or viral infections, allergic disorders, autoimmune diseases, conditions in which an individual has an enlarged spleen (e.g., Felty syndrome, malaria and sarcoidosis), and some drug treatment regimens.

[0601] The polynucleotides, polypeptides, antibodies, and/or agonists or antagonists of the present invention may be useful in diagnosing, prognosing, preventing, and/or treating lymphocytopenias (decreased numbers of B and/or T lymphocytes), including, but not limited lymphocytopenias resulting from or associated with stress, drug treatments (e.g., drug treatment with corticosteroids, cancer chemotherapies, and/or radiation therapies), AIDS infection and/or other diseases such as, for example, cancer, rheumatoid arthritis, systemic lupus erythematosus, chronic infections, some viral infections and/or hereditary disorders (e.g., DiGeorge syndrome, Wiskott-Aldrich Syndome, severe combined immunodeficiency, ataxia telangiectsia).

[0602] The polynucleotides, polypeptides, antibodies, and/or agonists' or antagonists of the present invention may be useful in diagnosing, prognosing, preventing, and/or treating diseases and disorders associated with macrophage numbers and/or macrophage function including, but not limited to, Gaucher's disease, Niemann-Pick disease, Letterer-Siwe disease and Hand-Schuller-Christian disease.

[0603] In another embodiment, the polynucleotides, polypeptides, antibodies, and/or agonists or antagonists of the present invention may be useful in diagnosing, prognosing, preventing, and/or treating diseases and disorders associated with eosinophil numbers and/or eosinophil function including, but not limited to, idiopathic hypereosinophilic syndrome, eosinophilia-myalgia syndrome, and Hand-Schuller-Christian disease.

[0604] In yet another embodiment, the polynucleotides, polypeptides, antibodies, and/or agonists or antagonists of the present invention may be useful in diagnosing, prognosing, preventing, and/or treating leukemias and lymphomas including, but not limited to, acute lymphocytic (lymphpblastic) leukemia (ALL), acute myeloid (myelocytic, myelogenous, myeloblastic, or myelomonocytic) leukemia, chronic lymphocytic leukemia (e.g., B cell leukemias, T cell leukemias, Sezary syndrome, and Hairy cell leukenia), chronic myclocytic (myeloid, myelogenous, or granulocytic) leukemia, Hodgkin's lymphoma, non-hodgkin's lymphoma, Burkitt's lymphoma, and mycosis fungoides.

[0605] In other embodiments, the polynucleotides, polypeptides, antibodies, and/or agonists or antagonists of the present invention may be useful in diagnosing, prognosing, preventing, and/or treating diseases and disorders of plasma cells including, but not limited to, plasma cell dyscrasias, monoclonal gammaopathies, monoclonal gammopathies of undetermined significance, multiple myetoma, macroglobulinemia, Waldenstrom's macroglobulinemia, cryoglobulinemia, and Raynaud's phenomenon.

[0606] In other embodiments, the polynucleotides, polypeptides, antibodies, and/or agonists or antagonists of the present invention may be useful in treating, preventing, and/or diagnosing myeloproliferative disorders, including but not limited to, polycythemia vera, relative polycythemia, secondary polycythemia, myelofibrosis, acute myelofibrosis, agnogenic myelod metaplasia, thrombocythemia, (including both primary and seconday thrombocythemia) and chronic myelocytic leukemia.

[0607] In other embodiments, the polynucleotides, polypeptides, antibodies, and/or agonists or antagonists of the present invention may be useful as a treatment prior to surgery, to increase blood cell production.

[0608] In other embodiments, the polynucleotides, polypeptides, antibodies, and/or agonists or antagonists of the present invention may be useful as an agent to enhance the migration, phagocytosis, superoxide production, antibody dependent cellular cytotoxicity of neutrophils, eosionophils and macrophages.

[0609] In other embodiments, the polynucleotides, polypeptides, antibodies, and/or agonists or antagonists of the present invention may be useful as an agent to increase the number of stem cells in circulation prior to stem cells pheresis. In another specific embodiment, the polynucleotides, polypeptides, antibodies, and/or agonists or antagonists of the present invention may be useful as an agent to increase the number of stem cells in circulation prior to platelet pheresis.

[0610] In other embodiments, the polynucleotides, polypeptides, antibodies, and/or agonists or antagonists of the present invention may be useful as an agent to increase cytokine production.

[0611] In other embodiments, the polynucleotides, polypeptides, antibodies, and/or agonists or antagonists of the present invention may be useful in preventing, diagnosing, and/or treating primary hematopoietic disorders.

[0612] Hyperproliferative Disorders

[0613] Endocrine associated polynucleotides or polypeptides, or agonists or antagonists thereof, can be used to treat, prevent, diagnose and/or prognose hyperproliferative diseases, disorders, and/or conditions, including neoplasms.

[0614] In a specific embodiment, endocrine associated polynucleotides or polypeptides, or agonists or antagonists thereof, can be used to treat, prevent, and/or diagnose hyperproliferative diseases, disorders, and/or conditions of the endocrine system.

[0615] In a preferred embodiment, endocrine associated polynucleotides or polypeptides, or agonists or antagonists thereof, can be used to treat, prevent, and/or diagnose neoplasms of endocrine system tissues.

[0616] Endocrine associated polynucleotides or polypeptides, or agonists or antagonists of the invention, may inhibit the proliferation of the disorder through direct or indirect interactions. Alternatively, endocrine associated polynucleotides or polypeptides, or agonists or antagonists thereof, may proliferate other cells, which can inhibit the hyperproliferative disorder.

[0617] For example, by increasing an immune response, particularly increasing antigenic qualities of the hyperproliferative disorder or by proliferating, differentiating, or mobilizing T-cells, hyperproliferative diseases, disorders, and/or conditions can be treated, prevented, and/or diagnosed. This immune response may be increased by either enhancing an existing immune response, or by initiating a new immune response. Alternatively, decreasing an immune response may also be a method of treating, preventing, and/or diagnosing hyperproliferative diseases, disorders, and/or conditions, such as a chemotherapeutic agent.

[0618] Examples of hyperproliferative diseases, disorders, and/or conditions that can be treated, prevented, and/or diagnosed by endocrine associated polynucleotides or polypeptides, or agonists or antagonists thereof, include, but are not limited to neoplasms located in the: prostate, colon, abdomen, bone, breast, digestive system, liver, pancreas, peritoneum, endocrine glands (adrenal, parathyroid, pituitary, testicles, ovary, thymus, thyroid), eye, head and neck, nervous (central and peripheral), lymphatic system, pelvic, skin, soft tissue, spleen, thoracic, and urogenital.

[0619] Similarly, other hyperproliferative disorders can also be treated or detected by polynucleotides or polypeptides, or agonists or antagonists of the present invention. Examples of such hyperproliferative disorders include, but are not limited to: Acute Childhood Lymphoblastic Leukemia, Acute Lymphoblastic Leukemia, Acute Lymphocytic Leukemia, Acute Myeloid Leukemia, Adrenocortical Carcinoma, Adult (Primary) Hepatocellular Cancer, Adult (Primary) Liver Cancer, Adult Acute Lymphocytic Leukemia, Adult Acute Myeloid Leukemia, Adult Hodgkin's Disease, Adult Hodgkin's Lymphoma, Adult Lymphocytic Leukemia, Adult Non-Hodgkin's Lymphoma, Adult Primary Liver Cancer, Adult Soft Tissue Sarcoma, AIDS-Related Lymphoma, AIDS-Related Malignancies, Anal Cancer, Astrocytoma, Bile Duct Cancer, Bladder Cancer, Bone Cancer, Brain Stern Glioma, Brain Tumors, Breast Cancer, Cancer of the Renal Pelvis and Ureter, Central Nervous System (Primary) Lymphoma, Central Nervous System Lymphoma, Cerebellar Astrocytoma, Cerebral Astrocytoma, Cervical Cancer, Childhood (Primary) Hepatocellular Cancer, Childhood (Primary) Liver Cancer, Childhood Acute Lymphoblastic Leukemia, Childhood Acute Myeloid Leukemia, Childhood Brain Stem Glioma, Childhood Cerebellar Astrocytoma, Childhood Cerebral Astrocytoma, Childhood Extracranial Germ Cell Tumors, Childhood Hodgkin's Disease, Childhood Hodgkin's Lymphoma, Childhood Hypothalamic and Visual Pathway Glioma, Childhood Lymphoblastic Leukemia, Childhood Medulloblastoma, Childhood Non-Hodgkin's. Lymphoma, Childhood Pineal and Supratentorial, Primitive Neuroectodermal Tumors, Childhood Primary Liver Cancer, Childhood Rhabdomyosarcoma, Childhood Soft Tissue Sarcoma, Childhood Visual Pathway and Hypothalamic Glioma, Chronic Lymphocytic Leukemia, Chronic Myelogenous Leukemia, Colon Cancer, Cutaneous T-Cell Lymphoma, Endocrine Pancreas Islet Cell Carcinoma, Endometrial Cancer, Ependymoma, Epithelial Cancer, Esophageal Cancer, Ewing's Sarcoma and Related Tumors, Exocrine Pancreatic Cancer, Extracranial Germ Cell Tumor, Extragonadal Germ Cell Tumor, Extrahepatic Bile Duct Cancer, Eye Cancer, Female Breast Cancer, Gaucher's Disease, Gallbladder Cancer, Gastric Cancer, Gastrointestinal Carcinoid Tumor, Gastrointestinal Tumors, Germ Cell Tumors, Gestational Trophoblastic Tumor, Hairy Cell Leukemia, Head and Neck Cancer, Hepatocellular Cancer, Hodgkin's Disease, Hodgkin's Lymphoma, Hypergammaglobulinemia, Hypopharyngeal Cancer, Intestinal Cancers, Intraocular Melanoma, Islet Cell Carcinoma, Islet Cell Pancreatic Cancer, Kaposi's Sarcoma, Kidney Cancer, Laryngeal Cancer, Lip and Oral Cavity Cancer, Liver Cancer, Lung Cancer, Lymphoproliferative Disorders, Macroglobulinemia, Male Breast Cancer, Malignant Mesothelioma, Malignant Thymoma, Medulloblastoma, Melanoma, Mesothelioma, Metastatic Occult Primary Squamous Neck Cancer, Metastatic Primary Squamous Neck Cancer, Metastatic Squamous Neck Cancer, Multiple Myeloma, Multiple Myeloma/Plasma Cell Neoplasm, Myelodysplastic Syndrome, Myelogenous Leukemia, Myeloid Leukemia, Myeloproliferative Disorders, Nasal Cavity and Paranasal Sinus Cancer, Nasopharyngeal Cancer, Neuroblastoma, Non-Hodgkin's Lymphoma During Pregnancy, Nonmelanoma Skin Cancer, Non-Small Cell Lung Cancer, Occult Primary Metastatic Squamous Neck Cancer, Oropharyngeal Cancer, Osteo-/Malignant Fibrous Sarcoma, Osteosarcoma/Malignant Fibrous Histiocytoma, Osteosarcoma/Malignant Fibrous Histiocytoma of Bone, Ovarian Epithelial Cancer, Ovarian Germ Cell Tumor, Ovarian Low Malignant Potential Tumor, Pancreatic Cancer, Paraproteinemias, Purpura, Parathyroid Cancer, Penile Cancer, Pheochromocytoma, Pituitary Tumor, Plasma Cell Neoplasm/Multiple Myeloma, Primary Central Nervous System Lymphoma, Primary Liver Cancer, Prostate Cancer, Rectal Cancer, Renal Cell Cancer, Renal Pelvis and Ureter Cancer, Retinoblastoma, Rhabdomyosarcoma, Salivary Gland Cancer, Sarcoidosis Sarcomas, Sezary Syndrome, Skin Cancer, Small Cell Lung Cancer, Small Intestine Cancer, Soft Tissue Sarcoma, Squamous Neck Cancer, Stomach Cancer, Supratentorial Primitive Neuroectoderrnal and Pineal Tumors, T-Cell Lymphoma, Testicular Cancer, Thymoma, Thyroid Cancer, Transitional Cell Cancer of the Renal Pelvis and Ureter, Transitional Renal Pelvis and Ureter Cancer, Trophoblastic Tumors, Ureter and Renal Pelvis Cell Cancer, Urethral Cancer, Uterine Cancer, Uterine Sarcoma, Vaginal Cancer, Visual Pathway and Hypothalamic Glioma, Vulvar Cancer, Waldenstrom's Macroglobulinemia, Wilms' Tumor, and any other hyperproliferative disease, besides neoplasia, located in an organ system listed above.

[0620] In another preferred embodiment, polynucleotides or polypeptides, or agonists or antagonists of the present invention are used to diagnose, prognose, prevent, and/or treat premalignant conditions and to prevent progression to a neoplastic or malignant state, including but not limited to those disorders described above. Such uses are indicated in conditions known or suspected of preceding progression to neoplasia or cancer, in particular, where non-neoplastic cell growth consisting of hyperplasia, metaplasia, or most particularly, dysplasia has occurred (for review of such abnormal growth conditions, see Robbins and Angell, 1976, Basic Pathology, 2d Ed., W. B. Saunders Co., Philadelphia, pp. 68-79.)

[0621] Hyperplasia is a form of controlled cell proliferation, involving an increase in cell number in a tissue or organ, without significant alteration in structure or function. Hyperplastic disorders which can be diagnosed, prognosed, prevented, and/or treated with compositions of the invention (including polynucleotides, polypeptides, agonists or antagonists) include, but are not limited to, angiofollicular mediastinal lymph node hyperplasia, angiolymphoid hyperplasia with eosinophilia, a typical melanocytic hyperplasia, basal cell hyperplasia, benign giant lymph node hyperplasia, cementum hyperplasia, congenital adrenal hyperplasia, congenital sebaceous hyperplasia, cystic hyperplasia, cystic hyperplasia of the breast, denture hyperplasia, ductal hyperplasia, endometrial hyperplasia, fibromuscular hyperplasia, focal epithelial hyperplasia, gingival hyperplasia, inflammatory fibrous hyperplasia, inflammatory papillary hyperplasia, intravascular papillary endothelial hyperplasia, nodular hyperplasia of prostate, nodular regenerative hyperplasia, pseudoepitheliomatous hyperplasia, senile sebaceous hyperplasia, and verrucous hyperplasia.

[0622] Metaplasia is a form Qf controlled cell growth in which one type of adult or fully differentiated cell substitutes for another type of adult cell. Metaplastic disorders which can be diagnosed, prognosed, prevented, and/or treated with compositions of the invention (including polynucleotides, polypeptides, agonists or antagonists) include, but are not limited to, agnogenic myeloid metaplasia, apocrine metaplasia, a typical metaplasia, autoparenchymatous metaplasia, connective tissue metaplasia, epithelial metaplasia, intestinal metaplasia, metaplastic anemia, metaplastic ossification, metaplastic polyps, myeloid metaplasia, primary myeloid metaplasia, secondary myeloid metaplasia, squamous metaplasia, squamous metaplasia of amnion, and symptomatic myeloid metaplasia.

[0623] Dysplasia is frequently a forerunner of cancer, and is found mainly in the epithelia; it is the most disorderly form of non-neoplastic cell growth, involving a loss in individual cell uniformity and in the architectural orientation of cells. Dysplastic cells often have abnormally large, deeply stained nuclei, and exhibit pleomorphism. Dysplasia characteristically occurs where there exists chronic irritation or inflammation. Dysplastic disorders which can be diagnosed, prognosed, prevented, and/or treated with compositions of the invention (including polynucleotides, polypeptides, agonists or antagonists) include, but are not limited to, anhidrotic ectodermal dysplasia, anterofacial dysplasia, asphyxiating thoracic dysplasia, atriodigital dysplasia, bronchopulmonary dysplasia, cerebral dysplasia, cervical dysplasia, chondroectodermal dysplasia, cleidocranial dysplasia, congenital ectodermal dysplasia, craniodiaphysial dysplasia, craniocarpotarsal dysplasia, craniometaphysial dysplasia, dentin dysplasia, diaphysial dysplasia, ectodermal dysplasia, enamel dysplasia, encephalo-ophthalmic dysplasia, dysplasia epiphysialis hemimelia, dysplasia epiphysialis multiplex, dysplasia epiphysialis punctata, epithelial dysplasia, faciodigitogenital dysplasia, familial fibrous dysplasia of jaws, familial white folded dysplasia, fibromuscular dysplasia, fibrous dysplasia of bone, florid osseous dysplasia, hereditary renal-retinal dysplasia, hidrotic ectodermal dysplasia, hypohidrotic ectodermal dysplasia, lymphopenic thymic dysplasia, mammary dysplasia, mandibulofacial dysplasia, metaphysial dysplasia, Mondini dysplasia, monostotic fibrous dysplasia, mucoepithelial dysplasia, multiple epiphysial dysplasia, oculoauriculovertebral dysplasia, oculodentodigital dysplasia, oculovertebral dysplasia, odontogenic dysplasia, ophthalmomandibulornelic dysplasia, periapical cemental dysplasia, polyostotic fibrous dysplasia, pseudoachondroplastic spondyloepiphysial dysplasia, retinal dysplasia, septo-optic dysplasia, spondyloepiphysial dysplasia, and ventriculoradial dysplasia.

[0624] Additional pre-neoplastic disorders which can be diagnosed, prognosed, prevented, and/or treated with compositions of the invention (including polynucleotides, polypeptides, agonists or antagonists) include, but are not limited to, benign dysproliferative disorders (e.g., benign tumors, fibrocystic conditions, tissue hypertrophy, intestinal polyps, colon polyps, and esophageal dysplasia), leukoplakia, keratoses, Bowen's disease, Farmer's Skin, solar cheilitis, and solar keratosis.

[0625] In another ernbodiment, a polypeptide of the invention, or polynucleotides, antibodies, agonists, or antagonists corresponding to that polypeptide, may be used to diagnose and/or prognose hyperproliferative disorders associated with the tissue(s) in which the polypeptide of the invention is expressed, including one, two, three, four, five, or more tissues disclosed in Table 1A, column 7 (Tissue Distribution Library Code).

[0626] In another embodiment, polynucleotides, polypeptides, antibodies, and/or agonists or antagonists of the present invention conjugated to a toxin or a radioactive isotope, as described herein, may be used to treat cancers and neoplasms, including, but not limited to those described herein. In a further preferred embodiment, polynucleotides, polypeptides, antibodies, and/or agonists or antagonists of the present invention conjugated to a toxin or a radioactive isotope, as described herein, may be used to treat acute myelogenous leukemia.

[0627] Additionally, polynucleotides, polypeptides, and/or agonists or antagonists of the invention may affect apoptosis, and therefore, would be useful in treating a number of diseases associated with increased cell survival or the inhibition of apoptosis. For example, diseases associated with increased cell survival or the inhibition of apoptosis that could be diagnosed, prognosed, prevented, and/or treated by polynucleotides, polypeptides, and/or agonists or antagonists of the invention, include cancers (such as follicular lymphomas, carcinomas with p53 mutations, and hormone-dependent tumors, including, but not limited to colon cancer, cardiac tumors, pancreatic cancer, melanoma, retinoblastoma, glioblastoma, lung cancer, intestinal cancer, testicular cancer, stomach cancer, neuroblastoma, myxoma, myoma, lymphoma, endothelioma, osteoblastoma, osteoclastoma, osteosarcoma, chondrosarcoma, adenonia, breast cancer, prostate cancer, Kaposi's sarcoma and ovarian cancer); autoimmune disorders such as, multiple sclerosis, Sjogren's syndrome, Hashimoto's thyroiditis, biliary cirrhosis, Behcet's disease, Crohn's disease, polymyositis, systemic lupus erythematosus and immune-related glomerulonephritis and rheumatoid arthritis) and viral infections (such as herpes viruses, pox viruses and adenoviruses), inflammation, graft v. host disease, acute graft rejection, and chronic graft rejection.

[0628] In preferred embodiments, polynucleotides, polypeptides, and/or agonists or antagonists of the invention are used to inhibit growth, progression, and/or metastasis of cancers, in particular those listed above.

[0629] Additional diseases or conditions associated with increased cell survival that could be diagnosed, prognosed, prevented, and/or treated by polynucleotides, polypeptides, and/or agonists or antagonists of the invention, include, but are not limited to, progression, and/or metastases of malignancies and related disorders such as leukemia (including acute leukemias (e.g., acute lymphocytic leukemia, acute myelocytic leukemia (including myeloblastic, promyelocytic, myclomonocytic, monocytic, and erythroleukemia)) and chronic leukemias (e.g., chronic myelocytic (granulocytic) leukemia and chronic lymphocytic leukemia)), polycythemia vera, lymphomas (e.g., Hodgkin's disease and non-Hodgkin's disease), multiple myeloma, Waldenstrom's macroglobulinemia, heavy chain disease, and solid tumors including, but not limited to, sarcomas and carcinomas such as fibrosarcoma, myxosarcoma, liposarcoma, chondrosarcoma, osteogenic sarcoma, chordoma, angiosarcoma, endotheliosarcoma, lymphangiosarcoma, lymphangioendotheliosarcoma, synovioma, mesothelioma, Ewing's tumor, leiomyosarcoma, rhabdomyosarcoma, colon carcinoma, pancreatic cancer, breast cancer, ovarian cancer, prostate cancer, squamous cell carcinoma, basal cell carcinoma, adenocarcinoma, sweat gland carcinoma, sebaceous gland carcinoma, papillary carcinoma, papillary adenocarcinomas, cystadenocarcinoma, medullary carcinoma, bronchogenic carcinoma, renal cell. carcinoma, hepatoma, bile duct carcinoma, choriocarcinoma, seminoma, embryonal carcinoma, Wilm's tumor, cervical cancer, testicular tumor, lung carcinoma, small cell lung carcinoma, bladder carcinoma, epithelial carcinoma, glioma, astrocytoma, medulloblasto ma, craniopharyngioma, ependymoma, pinealoma, emangioblastoma, acoustic neuroma, oligodendroglioma, menangioma, melanoma, neuroblastoma, and retinoblastoma.

[0630] Diseases associated with increased apoptosis that could be diagnosed, prognosed, prevented, and/or treated by polynucleotides, polypeptides, and/or agonists or antagonists of the invention, include AIDS; neurodegenerative disorders (such as Alzheimer's disease, Parkinson's disease, amyotrophic lateral sclerosis, retinitis pigmentosa, cerebellar degeneration and brain tumor or prior associated disease); autoimmune disorders (such as, multiple sclerosis, Sjogren's syndrome, Hashimoto's thyroiditis, biliary cirrhosis, Behcet's disease, Crohn's disease, polymyositis, systemic lupus erythematosus and immune-related glomerulonephritis and rheumatoid arthritis) myelodysplastic syndromes (such as aplastic anemia), graft v. host disease, ischemic injury (such as that caused by myocardial infarction, stroke and reperfusion injury), liver injury (e.g., hepatitis related liver injury, ischemia/reperfusion injury, cholestosis (bile duct injury) and liver cancer); toxin-induced liver disease (such as that caused by alcohol), septic shock, cachexia and anorexia.

[0631] Hyperproliferative diseases and/or disorders that could be diagnosed, prognosed, prevented, and/or treated by polynucleotides, polypeptides, and/or agonists or antagonists of the invention, include, but are not limited to, neoplasms located in the liver, abdomen, bone, breast, digestive system, pancreas, peritoneum, endocrine glands (adrenal, parathyroid, pituitary, testicles, ovary, thymus, thyroid), eye, head and neck, nervous system (central and peripheral), lymphatic system, pelvis, skin, soft tissue, spleen, thorax, and urogenital tract.

[0632] Similarly, other hyperproliferative disorders can also be diagnosed, prognosed, prevented, and/or treated by polynucleotides, polypeptides, and/or agonists or antagonists of the invention. Examples of such hyperproliferative disorders include, but are not limited to: hypergammaglobulinemia, lymphoproliferative disorders, paraproteinemias, purpura, sarcoidosis, Sezary Syndrome, Waldenstron's macroglobulinemia, Gaucher's Disease, histiocytosis, and any other hyperproliferative disease, besides neoplasia, located in an organ system listed above.

[0633] One preferred embodiment utilizes polynucleotides of the present invention to inhibit aberrant cellular division, by gene therapy using the present invention, and/or protein fusions or fragments thereof.

[0634] Thus, the present invention provides a method for treating cell proliferative diseases, disorders, and/or conditions by inserting into an abnormally proliferating cell a polynucleotide of the present invention, wherein said polynucleotide represses said cell proliferation, disease, disorder, and/or condition.

[0635] In a preferred embodiment, the present invention provides a method for treating cell proliferative diseases, disorders and/or conditions of the Endocrine System by inserting into a cell, a polynucleotide of the present invention, wherein said polynucleotide represses said cell proliferation, disease and/or disorder.

[0636] Another embodiment of the present invention provides a method of treating cell-proliferative diseases, disorders, and/or conditions in individuals comprising administration of one or more active gene copies of the present invention to an abnormally proliferating cell or cells. In a preferred embodiment, polynucleotides of the present invention is a DNA construct comprising a recombinant expression vector effective in expressing a DNA sequence encoding said polynucleotides. In another preferred embodiment of the present invention, the DNA construct encoding the polynucleotides of the present invention is inserted into cells to be treated utilizing a retrovirus, or more preferably an adenoviral vector (see, e.g., G J. Nabel, et. al., PNAS 96: 324-326 (1999), which is hereby incorporated by reference). In a most preferred embodiment, the viral vector is defective and will not transform non-proliferating cells, only proliferating cells. Moreover, in a preferred embodiment, the polynucleotides of the present invention inserted into proliferating cells either alone, or in combination with or fused to other polynucleotides, can then be modulated via an external stimulus (i.e., magnetic, specific small molecule, chemical, or drug administration, etc.), which acts upon the promoter upstream of said polynucleotides to induce expression of the encoded protein product. As such the beneficial therapeutic affect of the present invention may be expressly modulated (i.e., to increase, decrease, or inhibit expression of the present invention) based upon said external stimulus.

[0637] Polynucleotides of the present invention may be useful in repressing expression of oncogenic genes or antigens. By “repressing expression of the oncogenic genes” is intended the suppression of the transcription of the gene, the degradation of the gene transcript (pre-message RNA), the inhibition of splicing, the destruction of the messenger RNA, the prevention of the post-translational modifications of the protein, the destruction of the protein, or the inhibition of the normal function of the protein.

[0638] For local administration to abnormally proliferating cells, polynucleotides of the present invention may be administered by any method known to those of skill in the art including, but not limited to transfection, electroporation, microinjection of cells, or in vehicles such as liposomes, lipofectin, or as naked polynucleotides, or any other method described throughout the specification. The polynucleotide of the present invention may be delivered by known gene delivery systems such as, but not limited to, retroviral vectors (Gilboa, J. Virology 44:845 (1982); Hocke, Nature 320:275 (1986); Wilson, et al., Proc. Natl. Acad. Sci. U.S.A. 85:3014), vaccinia virus system (Chakrabarty et al., Mol. Cell Biol. 5:3403 (1985) or other efficient DNA delivery systems (Yates et al., Nature 313:812 (1985)) known to those skilled in the art. These references are exemplary only and are hereby incorporated by reference. In order to specifically deliver or transfect cells which are abnormally proliferating and spare non-dividing cells, it is preferable to utilize a retrovirus, or adenoviral (as described in the art and elsewhere herein) delivery system known to those of skill in the art. Since host DNA replication is required for retroviral DNA to integrate and the retrovirus will be unable to self replicate due to the lack of the retrovirus genes needed for its life cycle. Utilizing such a retroviral delivery system for polynucleotides of the present invention will target said gene and constructs to abnormally proliferating cells and will spare the non-dividing normal cells.

[0639] The polynucleotides of the present invention may be delivered directly to cell proliferative disorder/disease sites in internal organs, body cavities and the like by use of imaging devices used to guide an injecting needle directly to the disease site. The polynucleotides of the present invention may also be administered to disease sites at the time of surgical intervention.

[0640] By “cell proliferative disease” is meant any human or animal disease or disorder, affecting any one or any combination of organs, cavities, or body parts, which is characterized by single or multiple local abnormal proliferations of cells, groups of cells, or tissues, whether benign or malignant.

[0641] Any amount of the polynucleotides of the present invention may be administered as long as it has a biologically inhibiting effect on the proliferation of the treated cells. Moreover, it is possible to administer more than one of the polynucleotide of the present invention simultaneously to the same site. By “biologically inhibiting” is meant partial or total growth inhibition as well as decreases in the rate of proliferation or growth of the cells. The biologically inhibitory dose may be determined by assessing the effects of the polynucleotides of the present invention on target malignant or abnormally proliferating cell growth in tissue culture, tumor growth in animals and cell cultures, or any other method known to one of ordinary skill in the art.

[0642] The present invention is further directed to antibody-based therapies which involve administering of anti-polypeptides and anti-polynucleotide antibodies to a mammalian, preferably human, patient for treating one or more of the described diseases, disorders, and/or conditions. Methods for producing anti-polypeptides and anti-polynucleotide antibodies polyclonal and monoclonal antibodies are described in detail elsewhere herein. Such antibodies may be provided in pharmaceutically acceptable compositions as known in the art or as described herein.

[0643] A summary of the ways in which the antibodies of the present invention may be used therapeutically includes binding polynucleotides or polypeptides of the present invention locally or systemically in the body or by direct cytotoxicity of the antibody, e.g., as mediated by complement (CDC) or by effector cells (ADCC). Some of these approaches are described in more detail below. Armed with the teachings provided herein, one of ordinary skill in the art will know how to use the antibodies of the present invention for diagnostic, monitoring or therapeutic purposes without undue experimentation.

[0644] In particular, the antibodies, fragments and derivatives of the present invention are useful for treating a subject having or developing cell proliferative and/or differentiation diseases, disorders, and/or conditions as described herein. Such treatment comprises administering a single or multiple doses of the antibody, or a fragment, derivative, or a conjugate thereof.

[0645] The antibodies of this invention may be advantageously utilized in combination with other monoclonal or chimeric antibodies, or with lymphokines or hematopoietic growth factors, for example, which serve to increase the number or activity of effector cells which interact with the antibodies.

[0646] It is preferred to use high affinity and/or potent in vivo inhibiting and/or neutralizing antibodies against polypeptides or polynucleotides of the present invention, fragments or regions thereof, for both immunoassays directed to and therapy of diseases, disorders, and/or conditions related to polynucleotides or polypeptides, including fragments thereof, of the present invention. Such antibodies, fragments, or regions, will preferably have an affinity for polynucleotides or polypeptides, including fragments thereof. Preferred binding affinities include those with a dissociation constant or Kd less than 5×10⁻⁶M, 10⁻⁶M, 5×10⁻⁷M, 10⁻⁷M, 5×10⁻⁸M, 10⁻⁸M, 5×10⁻⁹M, 10⁻⁹M, 5×10⁻¹⁰M, 10⁻¹⁰M, 5×10⁻¹¹M, 10⁻¹¹M, 5×10⁻¹²M, 10⁻¹²M, 5×10⁻¹³M, 10⁻¹³M, 5×10⁻¹⁴M, 10⁻¹⁴M, 5×10⁻¹⁵M, and 10⁻¹⁵M.

[0647] Moreover, endocrine antigen polypeptides of the present invention or fragments thereof, are useful in inhibiting the angiogenesis of proliferative cells or tissues, either alone, as a protein fusion, or in combination with other polypeptides directly or indirectly, as described elsewhere herein. In a most preferred embodiment, said anti-angiogenesis effect may be achieved indirectly, for example, through the inhibition of hematopoietic, tumor-specific cells, such as tumor-associated macrophages (see, e.g., Joseph I B, et al. J Natl Cancer Inst, 90(21):1648-53 (1998), which is hereby incorporated by reference). Antibodies directed to polypeptides or polynucleotides of the present invention may also result in inhibition of angiogenesis directly, or indirectly (see, e.g., Witte L, et al., Cancer Nietastasis Rev. 17(2):155-61 (1998), which is hereby incorporated by reference)).

[0648] Polypeptides, including protein fusions, of the present invention, or fragments thereof may be useful in inhibiting proliferative cells or tissues through the induction of apoptosis. Said polypeptides may act either directly, or indirectly to induce apoptosis of proliferative cells and tissues, for example in the activation of a death-domain receptor, such as tumor necrosis factor (TNF) receptor-1, CD95 (Fas/APO-1), TNF-receptor-related apoptosis-mediated protein (TRAMP) and TNF-related apoptosis-inducing ligand (TRAIL) receptor-land-2 (see, e.g., Schulze-Osthoff K, et.al., Eur J Biochem 254(3):439-59 (1998), which is hereby incorporated by reference). Moreover, in another preferred embodiment of the present invention, said polypeptides may induce apoptosis through other mechanisms, such as in the activation of other proteins which will activate apoptosis, or through stimulating the expression of said proteins, either alone or in combination with small molecule drugs or adjuvants, such as apoptonin, galectins, thioredoxins, antiinflammatory proteins (See for example, Mutat. Res. 400(1-2):447-55 (1998), Med Hypotheses.50(5):423-33 (1998), Chem. Biol. Interact. Apr 24; 111-112:23-34 (1998), J. Mo. Med. 76(6):402-12 (1998), Int. J. Tissue React. 20(1):3-15 (1998), which are all hereby incorporated by reference).

[0649] Polypeptides, including protein fusions to, or fragments thereof, of the present invention are useful in inhibiting the metastasis of proliferative cells or tissues. Inhibition may occur as a direct result of administering polypeptides, or antibodies directed to said polypeptides as described elsewhere herein, or indirectly, such as activating the expression of proteins known to inhibit metastasis, for example alpha 4 integrins, (See, e.g., Curr Top Microbiol Immunol 1998;231:125-41, which is hereby incorporated by reference). Such therapeutic affects of the present invention may be achieved either alone, or in combination with small molecule drugs or adjuvants.

[0650] In another embodiment, the invention provides a method of delivering compositions containing the polypeptides of the invention (e.g., compositions containing polypeptides or anti-endocrine antigen polypeptide antibodies associated with heterologous polypeptides, heterologous nucleic acids, toxins, or prodrugs) to targeted cells expressing the polypeptide of the present invention. Endocrine antigen polypeptides or anti-endocrine antigen polypeptide antibodies of the invention may be associated with heterologous polypeptides, heterologous nucleic acids, toxins, or prodrugs via hydrophobic, hydrophilic, ionic and/or covalent interactions.

[0651] Polypeptides, protein fusions to, or fragments thereof, of the present invention are useful in enhancing the immunogenicity and/or antigenicity of proliferating cells or tissues, either directly, such as would occur if the polypeptides of the present invention ‘vaccinated’ the immune response to respond to proliferative antigens and immunogens, or indirectly, such as in activating the expression of proteins known to enhance the immune response (e.g. chemokines), to said antigens and immunogens.

[0652] Urinary System Disorders

[0653] Polynucleotides, polypeptides, antibodies, and/or agonists or antagonists of the present invention, may be used to treat, prevent, diagnose, and/or prognose disorders of the urinary system, including but not limited to disorders of the renal system, bladder, ureters, and urethra. Renal disorders include, but are not limited to, kidney failure, nephritis, blood vessel disorders of kidney, metabolic and congenital kidney disorders, urinary disorders of the kidney, autoimmune disorders, sclerosis and necrosis, electrolyte imbalance, and kidney cancers.

[0654] Kidney failure diseases include, but are not limited to, acute kidney failure, chronic kidney failure, atheroembolic renal failure, and end-stage renal disease. Inflammatory diseases of the kidney include acute glomerulonephritis, postinfectious glomerulonephritis, rapidly progressive glomerulonephritis, nephrotic syndrome, membranous glomerulonephritis, familial nephrotic syndrome, membranoproliferative glomerulonephritis I and II, mesangial proliferative glomerulonephritis, chronic glomerulonephritis, acute tubulointerstitial nephritis, chronic tubulointerstitial nephritis, acute post-streptococcal glomerulonephritis (PSGN), pyelonephritis, lupus nephritis, chronic nephritis, interstitial nephritis, and post-streptococcal glomerulonephritis.

[0655] Blood vessel disorders of the kidneys include, but are not limited to, kidney infarction, atheroembolic kidney disease, cortical necrosis, malignant nephrosclerosis, renal vein thrombosis, renal underperfusion, renal ischemia-reperfusion, renal artery embolism, and renal artery stenosis. Kidney disorders resulting form urinary tract problems include, but are not limited to, pyelonephritis, hydronephrosis, urolithiasis (renal lithiasis, nephrolithiasis), reflux nephropathy, urinary tract infections, urinary retention, and acute or chronic unilateral obstructive uropathy.

[0656] Metabolic and congenital disorders of the kidneys include, but are not limited to, renal tubular acidosis, renal glycosuria, nephrogenic diabetes insipidus, cystinuria, Fanconi's syndrome, vitamin D-resistant rickets, Hartnup disease, Bartter's syndrome, Liddle's syndrome, polycystic kidney disease, medullary cystic disease, medullary sponge kidney, Alport's syndrome, nail-patella syndrome, congenital nephrotic syndrome, CRUSH syndrome, horseshoe kidney, diabetic nephropathy, nephrogenic diabetes insipidus, analgesic nephropathy, kidney stones, and membranous nephropathy, Kidney disorders resulting from an autoimmune response include, but are not limited to, systemic lupus erythematosus (SLE), Goodpasture syndrome, IgA nephropathy, and IgM mesangial proliferative glomerulonephritis.

[0657] Sclerotic or necrotic disorders of the kidney include, but are not limited to, glomerulosclerosis, diabetic nephropathy, focal segmental glomerulosclerosis (FSGS), necrotizing glomerulonephritis, and renal papillary necrosis. Kidneys may also develop carcinomas, including, but not limited to, hypernephroma, nephroblastoma, renal cell cancer, transitional cell cancer, squamous cell cancer, and Wilm's tumor.

[0658] Kidney disorders may also result in electrolyte imbalances, including, but not limited to, nephrocalcinosis, pyuria, edema, hydronephritis, proteinuria, hyponatremia, hypernatremia, hypokalemia, hyperkalemia, hypocalcemia, hypercalcemia, hypophosphatemia, and hyperphosphatemia.

[0659] Bladder disorders include, but are not limited to, benign prostatic hyperplasia (BPH), interstitial cystitis (IC), prostatitis, proteinuria, urinary tract infections, urinary incontinence, urinary retention. Disorders of the ureters and urethra include, but are not limited to, acute or chronic unilateral obstructive uropathy. The bladder, ureters, and urethra may also develop carcinomas, including, but not limited to, superficial bladder canccer, invasive bladder cancer, carcinoma of the ureter, and urethra cancers.

[0660] Polypeptides may be administered using any method known in the art, including, but not limited to, direct needle injection at the delivery site, intravenous injection, topical administration, catheter infusion, biolistic injectors, particle accelerators, gelfoam sponge depots, other commercially available depot materials, osmotic pumps, oral or suppositorial solid pharmaceutical formulations, decanting or topical applications during surgery, aerosol delivery. Such methods are known in the art. Polypeptides may be administered as part of a Therapeutic, described in more detail below. Methods of delivering polynucleotides are described in more detail herein.

[0661] Cardiovascular Disorders

[0662] Polynucleotides or polypeptides, or agonists or antagonists of the present invention, may be used to treat, prevent, diagnose, and/or prognose cardiovascular disorders, including, but not limited to, peripheral artery disease, such as limb ischemia.

[0663] Cardiovascular disorders include cardiovascular abnormalities, such as arterio-arterial fistula, arteriovenous fistula, cerebral arteriovenous malformations, congenital heart defects, pulmonary atresia, and Scimitar Syndrome. Congenital heart defects include aortic coarctation, cor triatriatum, coronary vessel anomalies, crisscross heart, dextrocardia, patent ductus arteriosus, Ebstein's anomaly, Eisenmenger complex, hypoplastic left heart syndrome, levocardia, tetralogy of fallot; transposition of great vessels, double outlet right ventricle, tricuspid atresia, persistent truncus arteriosus, total anomalous pulmonary venous connection, hypoplastic left heart syndrome, and heart septal defects, such as aortopulmonary septal defect, endocardial cushion defects, Lutembacher's Syndrome, atrioventricular canal defect, trilogy of Fallot, ventricular heart septal defects.

[0664] Cardiovascular disorders also include heart disease, such as arrhythmias, carcinoid heart disease, high cardiac output, low cardiac output, cardiac tamponade, endocarditis (including bacterial), heart aneurysm, cardiac arrest, sudden cardiac death, congestive heart failure, congestive cardiomyopathy, paroxysmal dyspnea, cardiac edema, heart hypertrophy, congestive cardiomyopathy, left ventricular hypertrophy, right ventricular hypertrophy, post-infarction heart rupture, ventricular septal rupture, heart valve diseases, myocardial diseases, myocardial ischemia, pericardial effusion, pericarditis (including constrictive and tuberculous), pneumopericardium, postpericardiotomy syndrome, pulmonary heart disease, rheumatic heart disease, ventricular dysfunction, hyperemia, cardiovascular pregnancy complications, Scimitar Syndrome, diastolic dysfunction, enlarged heart, heart block, J-curve phenomenon, rheumatic heart disease, Marfan syndrome, cardiovascular syphilis, and cardiovascular tuberculosis.

[0665] Arrhythmias include sinus arrhythmia, atrial fibrillation, atrial flutter, bradycardia, extrasystole, Adams-Stokes Syndrome, bundle-branch block, sinoatrial block, long QT syndrome, parasystole, Lown-Ganong-Levine Syndrome, Mahaim-type pre-excitation syndrome, Wolff-Parkinson-White syndrome, sick sinus syndrome, tachycardias, and ventricular fibrillation. Tachycardias include paroxysmal tachycardia, supraventricular tachycardia, accelerated idioventricular rhythm, atrioventricular nodal reentry tachycardia, ectopic atrial tachycardia, ectopic Junctional tachycardia, sinoatrial nodal reentry tachycardia, sinus tachycardia, Torsades de Pointes, and ventricular tachycardia.

[0666] Heart valve disease include aortic valve insufficiency, aortic valve stenosis, heart murmurs, aortic valve prolapse, mitral valve prolapse, tricuspid valve prolapse, mitral valve insufficiency, mitral valve stenosis, pulmonary atresia, pulmonary valve insufficiency, pulmonary valve stenosis, tricuspid atresia, tricuspid valve insufficiency, tricuspid valve stenosis, and bicuspid aortic valve.

[0667] Myocardial diseases include alcoholic cardiomyopathy, congestive cardiomyopathy, hypertrophic cardiomyopathy, aortic subvalvular stenosis, pulmonary subvalvular stenosis, restrictive cardiomyopathy, Chagas cardiomyopathy, endocardial fibroelastosis, endomyocardial fibrosis, Kearns Syndrome, Barth syndrome, myocardial reperfusion injury, and myocarditis.

[0668] Myocardial ischemias include coronary disease, such as angina pectoris, Prinzmetal's angina, unstable angina, coronary aneurysm, coronary arteriosclerosis, coronary thrombosis, coronary vasospasm, myocardial infarction and myocardial stunning.

[0669] Cardiovascular diseases also include vascular diseases such as aneurysms, angiodysplasia, angiomatosis, bacillary angiomatosis, Hippel-Lindau Disease, Klippel-Trenaunay-Weber Syndrome, Sturge-Weber Syndrome, angioneurotic edema, aortic diseases, Takayasu's Arteritis, aortitis, Leriche's Syndrome, arterial occlusive diseases, arteritis, enarteritis, polyarteritis nodosa, cerebrovascular disorders, diabetic angiopathies, diabetic retinopathy, embolisms, thrombosis, erythromelalgia, hemorrhoids, hepatic veno-occlusive disease, hypertension, hypotension (shock), ischemia, peripheral vascular diseases, phlebitis, superficial phlebitis, pulmonary veno-occlusive disease, chronic obstructive pulmonary disease, Buerger's disease, Raynaud's disease, CREST syndrome, retinal vein occlusion, Scimitar syndrome, superior vena cava syndrome, telangiectasia, atacia telangiectasia, hereditary hemorrhagic telangiectasia, deep vein thrombosis, varicocele, varicose veins, varicose ulcer, vasculitis, and venous insufficiency.

[0670] Aneurysms include dissecting aneurysms, false aneurysms, infected aneurysms, ruptured aneurysms, aortic aneurysms, cerebral aneurysms, coronary aneurysms, heart aneurysms, and iliac aneurysms.

[0671] Arterial occlusive diseases include arteriosclerosis, arteriolosclerosis, atherosclerosis, intermittent claudication, carotid stenosis, fibromuscular dysplasias, mesenteric vascular occlusion, Moyamoya disease, renal artery obstruction, retinal artery occlusion, and thromboangiitis obliterans.

[0672] Cerebrovascular disorders include carotid artery diseases, cerebral amyloid angiopathy, cerebral aneurysm, cerebral anoxia, cerebral arteriosclerosis, cerebral arteriovenous malformation, cerebral artery diseases, cerebral embolism and thrombosis, carotid artery thrombosis, sinus thrombosis, Wallenberg's syndrome, cerebral hemorrhage, epidural hematoma, subdural hematoma, subaraxhnoid hemorrhage, cerebral infarction, cerebral ischemia (including transient), subclavian steal syndrome, periventricular leukormalacia, vascular headache, cluster headache, migraine, and vertebrobasilar insufficiency.

[0673] Embolisms include air embolisms, amniotic fluid embolisms, cholesterol embolisms, blue toe syndrome, fat embolisms, pulmonary embolisms, and thromoboembolisms. Thrombosis include coronary thrombosis, hepatic vein thrombosis, deep vein thrombosis, retinal vein occlusion, carotid artery thrombosis, sinus thrombosis, Wallenberg's syndrome, and thrombophlebitis.

[0674] Ischemia includes cerebral ischemia, ischemic colitis, silent ischemia, compartment syndromes, anterior compartment syndrome, myocardial ischemia, reperfusion injuries, and peripheral limb ischemia. Vasculitis includes aortitis, arteritis, Behcet's Syndrome, Churg-Strauss-Syndrome, mucocutaneous lymph node syndrome, thromboangiitis obliterans, hypersensitivity vasculitis, Schoenlein-Henoch purpura, allergic cutaneous vasculitis, and Wegener's granulomatosis.

[0675] Cardiovascular diseases can also occur due to electrolyte imbalances that include, but are not limited to hyponatremia, hypernatremia, hypokalemia, hyperkalemia, hypocalcemia, hypercalcemia, hypophosphatemia, and hyperphophatemia. Neoplasm and/or cancers of the cardiovascular system include, but are not limited to, myxomas, fibromas, and rhabdomyomas.

[0676] Polypeptides may be administered using any method known in the art, including, but not limited to, direct needle injection at the delivery site, intravenous injection, topical administration, catheter infusion, biolistic injectors, particle accelerators, gel foam sponge depots, other commercially available depot materials, osmotic pumps, oral or suppositorial solid pharmaceutical formulations, decanting or topical applications during surgery, aerosol delivery. Such methods are known in the art. Polypeptides may be administered as part of a Therapeutic, described in more detail below. Methods of delivering polynucleotides are described in more detail herein.

[0677] Respiratory Disorders

[0678] Polynucleotides or polypeptides, or agonists or antagonists of the present invention may be used to treat, prevent, diagnose, and/or prognose diseases and/or disorders of the respiratory system.

[0679] Diseases and disorders of the respiratory system include, but are not limited to, nasal vestibulitis, nonallergic rhinitis (e.g., acute rhinitis, chronic rhinitis, atrophic rhinitis, vasomotor rhinitis), nasal polyps, and sinusitis, juvenile angiofibromas, cancer of the nose and juvenile papillomas, vocal cord polyps, nodules (singer's nodules), contact ulcers, vocal cord paralysis, laryngoceles, pharyngitis (e.g., viral and bacterial), tonsillitis, tonsillar cellulitis, parapharyngeal abscess, laryngitis, laryngoceles, and throat cancers (e.g., cancer of the nasopharynx, tonsil cancer, larynx cancer), lung cancer (e.g., squamous cell carcinoma, small cell (oat cell) carcinoma, large cell carcinoma, and adenocarcinoma), allergic disorders (eosinophilic pneumonia, hypersensitivity pneumonitis (e.g., extrinsic allergic alveolitis, allergic interstitial pneumonitis, organic dust pneumoconiosis, allergic bronchopulmonary aspergillosis, asthma, Wegener's granulomatosis (granulomatous vasculitis), Goodpasture's syndrome)), pneumonia (e.g., bacterial pneumonia (e.g., Streptococcus pneumoniae (pneumoncoccal pneumonia), Staphylococcus aureus (staphylococcal pneumonia), Gram-negative bacterial pneumonia (caused by, e.g., Klebsiella and Pseudomas spp.), Mycoplasma pneumoniae pneumonia, Hemophilus influenzae pneumonia, Legionella pneumophila (Legionnaires' disease), and Chlamydia psittaci (Psittacosis)), and viral pneumonia (e.g., influenza, chickenpox (varicella).

[0680] Additional diseases and disorders of the respiratory system include, but are not limited to bronchiolitis, polio (poliomyelitis), croup, respiratory syncytial viral infection, mumps, erythema infectiosum (fifth disease), roseola infantum, progressive rubella panencephalitis, german measles, and subacute sclerosing panencephalitis), fungal pneumonia (e.g., Histoplasmosis, Coccidioidomycosis, Blastomycosis, fungal infections in people with severely suppressed immune systems (e.g., cryptococcosis, caused by Cryptococcus neoformans; aspergillosis, caused by Aspergillus spp.; candidiasis, caused by Candida; and mucormycosis)), Pneumocystis carinii (pneumocystis pneumonia), a typical pneumonias (e.g., Mycoplasma and Chlamydia spp.), opportunistic infection pneumonia, nosocomial pneumonia, chemical pneumonitis, and aspiration pneumonia, pleural disorders (e.g., pleurisy, pleural effusion, and pneumothorax (e.g., simple spontaneous pneumothorax, complicated spontaneous pneumothorax, tension pneumothorax)), obstructive airway diseases (e.g., asthma, chronic obstructive pulmonary disease (COPD), emphysema, chronic or acute bronchitis), occupational lung. diseases (e.g., silicosis; black lung (coal workers' pneumoconiosis), asbestosis, berylliosis, occupational asthsma, byssinosis, and benign pneumoconioses), Infiltrative Lung Disease (e.g., pulmonary fibrosis (e.g., fibrosing alveolitis, usual interstitial pneumonia), idiopathic pulmonary fibrosis, desquamative interstitial pneumonia, lymphoid interstitial pneumonia, histiocytosis X (e.g., Letterer-Siwe disease, Hand-Schüller-Christian disease, eosinophilic granuloma), idiopathic pulmonary hemosiderosis, sarcoidosis and pulmonary alveolar proteinosis), Acute respiratory distress syndrome (also called, e.g., adult respiratory distress syndrome), edema, pulmonary embolism, bronchitis (e.g., viral, bacterial), bronchiectasis, atelectasis, lung abscess (caused by, e.g., Staphylococcus aureus or Legionella pneumophila), and cystic fibrosis.

[0681] Anti-Angiogenesis Activity

[0682] The naturally occurring balance between endogenous stimulators and inhibitors of angiogenesis is one in which inhibitory influences predominate. Rastinejad et al., Cell 56:345-355 (1989). In those rare instances in which neovascularization occurs under normal physiological conditions, such as wound healing, organ regeneration, embryonic development, and female reproductive processes, angiogenesis is stringently regulated and spatially and temporally delimited. Under conditions of pathological angiogenesis such as that characterizing solid tumor growth, these regulatory controls fail. Unregulated angiogenesis becomes pathologic and sustains progression of many neoplastic and non-neoplastic diseases. A number of serious diseases are dominated by abnormal neovascularization including solid tumor growth and metastases, arthritis, some types of eye disorders, and psoriasis. See, e.g., reviews by Moses et al., Biotech. 9:630-634 (1991); Folkman et al., N. Engl. J. Med., 333:1757-1763 (1995); Auerbach et al., J. Microvasc. Res. 29:401-411 (1985); Folkman, Advances in Cancer Research, eds. Klein and Weinhouse, Academic Press, New York, pp. 175-203 (1985); Patz, Am. J. Opthalmol. 94:715-743 (1982); and Folkman et al., Science 221:719-725 (1983). In a number of pathological conditions, the process of angiogenesis contributes to the disease state. For example, significant data have accumulated which suggest that the growth of solid tumors is dependent on angiogenesis. Folkman and Klagsbrun, Science 235:442-447 (1987).

[0683] The present invention provides for treatment of diseases or disorders associated with neovascularization by administration of the polynucleotides and/or polypeptides of the invention, as well as agonists or antagonists of the present invention. Malignant and metastatic conditions which can be treated with the polynucleotides and polypeptides, or agonists or antagonists of the invention include, but are not limited to, malignancies, solid tumors, and cancers described herein and otherwise known in the art (for a review of such disorders, see Fishman et al., Medicine, 2d Ed., J. B. Lippincott Co., Philadelphia (1985)). Thus, the present invention provides a method of treating an angiogenesis-related disease and/or disorder, comprising administration to an individual in need thereof a therapeutically effective amount of a polynucleotide, polypeptide, antagonist and/or agonist of the invention. For example, polynucleotides, polypeptides, antagonists and/or agonists may be utilized in a variety of additional methods in order to therapeutically treat a cancer or tumor. Cancers which may be treated with polynucleotides, polypeptides, antagonists and/or agonists include, but are not limited to solid tumors, including prostate, lung, breast, ovarian, stomach, pancreas, larynx, esophagus, testes, liver, parotid, biliary tract, colon, rectum, cervix, uterus, endometrium, kidney, bladder, thyroid cancer; primary tumors and metastases; melanomas; glioblastoma; Kaposi's sarcoma; leiomyosarcoma; non-small cell lung cancer; colorectal cancer; advanced malignancies; and blood born tumors such as leukemias. For example, polynucleotides, polypeptides, antagonists and/or agonists may be delivered topically, in order to treat cancers such as skin cancer, head and neck tumors, breast tumors, and Kaposi's sarcoma.

[0684] Within yet other aspects, polynucleotides, polypeptides, antagonists and/or agonists may be utilized to treat superficial forms of bladder cancer by, for example, intravesical administration. Polynucleotides, polypeptides, antagonists and/or agonists may be delivered directly into the tumor, or near the tumor site, via injection or a catheter. Of course, as the artisan of ordinary skill will appreciate, the appropriate mode of administration will vary according to the cancer to be treated. Other modes of delivery are discussed herein.

[0685] Polynucleotides, polypeptides, antagonists and/or agonists may be useful in treating other disorders, besides cancers, which involve angiogenesis. These disorders include, but are not limited to: benign tumors, for example hemangiomas, acoustic neuromas, neurofibromas, trachomas, and pyogenic granulomas; artheroscleric plaques; ocular angiogenic diseases, for example, diabetic retinopathy, retinopathy of prematurity, macular degeneration, corneal graft rejection, neovascular glaucoma, retrolental fibroplasia, rubeosis, retinoblastoma, uvietis and Pterygia (abnormal blood vessel growth) of the eye; rheumatoid arthritis; psoriasis; delayed wound healing; endometriosis; vasculogenesis; granulations; hypertrophic scars (keloids); nonunion fractures; scleroderma; trachoma; vascular adhesions; myocardial angiogenesis; coronary collaterals; cerebral collaterals; arteriovenous malformations; ischemic limb angiogenesis; Osler-Webber Syndrome; plaque neovascularization; telangiectasia; hemophiliac joints; angiofibroma; fibromuscular dysplasia; wound granulation; Crohn's disease; and atherosclerosis.

[0686] For example, within one aspect of the present invention methods are provided for treating hypertrophic scars and keloids, comprising the step of administering a polynucleotide, polypeptide, antagonist and/or agonist of the invention to a hypertrophic scar or keloid.

[0687] Within one embodiment of the present invention polynucleotides, polypeptides, antagonists and/or agonists of the invention are directly injected into a hypertrophic scar or keloid, in order to prevent the progression of these lesions. This therapy is of particular value in the prophylactic treatment of conditions which are known to result in the development of hypertrophic scars and keloids (e.g., bums), and is preferably initiated after the proliferative phase has had time to progress (approximately 14 days after the initial injury), but before hypertrophic scar or keloid development. As noted above, the present invention also provides methods for treating neovascular diseases of the eye, including for example, corneal neovascularization, neovascular glaucoma, proliferative diabetic retinopathy, retrolental fibroplasia and macular degeneration.

[0688] Moreover, ocular disorders associated with neovascularization which can be treated with the polynucleotides and polypeptides of the present invention (including agonists and/or antagonists) include, but are not limited to: neovascular glaucoma, diabetic retinopathy, retinoblastoma, retrolental fibroplasia, uveitis, retinopathy of prematurity macular degeneration, corneal graft neovascularization, as well as other eye inflammatory diseases, ocular tumors and diseases associated with choroidal or iris neovascularization. See, e.g., reviews by Waltman et al., Am. J. Ophthal. 85:704-710 (1978) and Gartner et al., Surv. Ophthal. 22:291-312 (1978).

[0689] Thus, within one aspect of the present invention methods are provided for treating neovascular diseases of the eye such as corneal neovascularization (including corneal graft neovascularization), comprising the step of administering to a patient a therapeutically effective amount of a compound (as described above) to the cornea, such that the formation of blood vessels is inhibited. Briefly, the cornea is a tissue, which normally lacks blood vessels. In certain pathological conditions however, capillaries may extend into the cornea from the pericorneal vascular plexus of the limbus. When the cornea becomes vascularized, it also becomes clouded, resulting in a decline in the patient's visual acuity. Visual loss may become complete if the cornea completely opacitates. A wide variety of disorders can result in corneal neovascularization, including for example, corneal infections (e.g., trachoma, herpes simplex keratitis, leishmaniasis and onchocerciasis), immunological processes (e.g., graft rejection and Stevens-Johnson's syndrome), alkali burns, trauma, inflammation (of any cause), toxic and nutritional deficiency states, and as a complication of wearing contact lenses.

[0690] Within particularly preferred embodiments of the invention, may be prepared for topical administration in saline (combined with any of the preservatives and antimicrobial agents commonly used in ocular preparations), and administered in eyedrop form. The solution or suspension may be prepared in its pure form and administered several times daily. Alternatively, anti-angiogenic compositions, prepared as described above, may also be administered directly to the cornea. Within preferred embodiments, the anti-angiogenic composition is prepared with a muco-adhesive polymer, which binds to cornea. Within further embodiments, the anti-angiogenic factors or anti-angiogenic compositions may be utilized as an adjunct to conventional steroid therapy. Topical therapy may also be useful prophylactically in corneal lesions which are known to have a high probability of inducing an angiogenic response (such as chemical burns). In these instances the treatment, likely in combination with steroids, may be instituted immediately to help prevent subsequent complications.

[0691] Within other embodiments, the compounds described above may be injected directly into the corneal stroma by an ophthalmologist under microscopic guidance. The preferred site of injection may vary with the morphology of the individual lesion, but the goal of the administration would be to place the composition at the advancing front of the vasculature (i.e., interspersed between the blood vessels and the normal cornea). In most cases this would involve perilimbic corneal injection to “protect” the cornea from the advancing blood vessels. This method may also be utilized shortly after a corneal insult in order to prophylactically prevent corneal neovascularization. In this situation, the material could be injected in the perilimbic cornea interspersed between the corneal lesion and its undesired potential limbic blood supply. Such methods may also be utilized in a similar fashion to prevent capillary invasion of transplanted corneas. In a sustained-release form, injections might only be required 2-3 times per year. A steroid could also be added to the injection solution to reduce inflammation resulting from the injection itself.

[0692] Within another aspect of the present invention, methods are provided for treating neovascular glaucoma, comprising the step of administering to a patient a therapeutically effective amount of a polynucleotide, polypeptide, antagonist and/or agonist to the eye, such that the formation of blood vessels is inhibited. In one embodiment, the compound may be administered topically to the eye in order to treat early forms of neovascular glaucoma. Within other embodiments, the compound may be implanted by injection into the region of the anterior chamber angle. Within other embodiments, the compound may also be placed in any location such that the compound is continuously released into the aqueous humor. Within another aspect of the present invention, methods are provided for treating proliferative diabetic retinopathy, comprising the step of administering to a patient a therapeutically effective amount of a polynucleotide, polypeptide, antagonist and/or agonist to the eyes, such that the formation of blood vessels is inhibited.

[0693] Within particularly preferred embodiments of the invention, proliferative diabetic retinopathy may be treated by injection into the aqueous humor or the vitreous, in order to increase the local concentration of the polynucleotide, polypeptide, antagonist and/or agonist in the retina. Preferably, this treatment should be initiated prior to the acquisition of severe disease requiring photocoagulation.

[0694] Within another aspect of the present invention, methods are provided for treating retrolental fibroplasia, comprising the step of administering to a patient a therapeutically effective amount of a polynucleotide, polypeptide, antagonist and/or agonist to the eye, such that the formation of blood vessels is inhibited. The compound may be administered topically, via intravitreous injection and/or via intraocular implants.

[0695] Additionally, disorders which can be treated with the polynucleotides, polypeptides, agonists and/or agonists include, but are not limited to, hemangioma, arthritis, psoriasis, angiofibroma, atherosclerotic plaques, delayed wound healing, granulations, hemophilic joints, hypertrophic scars, nonunion fractures, Osler-Weber syndrome, pyogenic granuloma, scieroderma, trachoma, and vascular adhesions.

[0696] Moreover, disorders and/or states, which can be treated, prevented, diagnosed and/or prognosed with the polynucleotides, polypeptides, agonists and/or agonists of the invention include, but are not limited to, solid tumors, blood born tumors such as leukemias, tumor metastasis, Kaposi's sarcoma, benign tumors, for example hemangiomas, acoustic neuromas, neurofibromas, trachomas, and pyogenic granulomas, rheumatoid arthritis, psoriasis, ocular angiogenic diseases, for example, diabetic retinopathy, retinopathy of prematurity, macular degeneration, corneal graft rejection, neovascular glaucoma, retrolental fibroplasia, rubeosis, retinoblastoma, and uvietis, delayed wound healing, endometriosis, vascluogenesis, granulations, hypertrophic scars (keloids), nonunion fractures, scleroderma, trachoma, vascular adhesions, myocardial angiogenesis, coronary collaterals, cerebral collaterals, arteriovenous malformations, ischemic limb angiogenesis, Osler-Webber Syndrome, plaque neovascularization, telangiectasia, hemophiliac joints, angiofibroma fibromuscular dysplasia, wound granulation, Crohn's disease, atherosclerosis, birth control agent by preventing vascularization required for embryo implantation controlling menstruation, diseases that have angiogenesis as a pathologic consequence such as cat scratch disease (Rochele minalia quintosa), ulcers (Helicobacter pylori), Bartonellosis and bacillary angiomatosis.

[0697] In one aspect of the birth control method, an amount of the compound sufficient to block embryo implantation is administered before or after intercourse and fertilization have occurred, thus providing an effective method of birth control, possibly a “morning after” method. Polynucleotides, polypeptides, agonists and/or agonists may also be used in controlling menstruation or administered as either a peritoneal lavage fluid or for peritoneal implantation in the treatment of endometriosis.

[0698] Polynucleotides, polypeptides, agonists and/or agonists of the present invention may be incorporated into surgical sutures in order to prevent stitch granulomas.

[0699] Polynucleotides, polypeptides, agonists and/or agonists may be utilized in a wide variety of surgical procedures. For example, within one aspect of the present invention a compositions (in the form of, for example, a spray or film) may be utilized to coat or spray an area prior to removal of a tumor, in order to isolate normal surrounding tissues from malignant tissue, and/or to prevent the spread of disease to surrounding tissues. Within other aspects of the present invention, compositions (e.g., in the form of a spray) may be delivered via endoscopic procedures in order to coat tumors, or inhibit angiogenesis in a desired locale. Within yet other aspects of the present invention, surgical meshes, which have been coated with anti-angiogenic compositions of the present invention may be utilized in any procedure wherein a surgical mesh might be utilized. For example, within one embodiment of the invention a surgical mesh laden with an anti-angiogenic composition may be utilized during abdominal cancer resection surgery (e.g., subsequent to colon resection) in order to provide support to the structure, and to release an amount of the anti-angiogenic factor.

[0700] Within further aspects of the present invention, methods are provided for treating tumor excision sites, comprising administering a polynucleotide, polypeptide, agonist and/or agonist to the resection margins of a tumor subsequent to excision, such that the local recurrence of cancer and the formation of new blood vessels at the site is inhibited. Within one embodiment of the invention, the anti-angiogenic compound is administered directly to the tumor excision site (e.g., applied by swabbing, brushing or otherwise coating the resection margins of the tumor with the anti-angiogenic compound). Alternatively, the anti-angiogenic compounds may be incorporated into known surgical pastes prior to administration. Within particularly preferred embodiments of the invention, the anti-angiogenic compounds are applied after hepatic resections for malignancy, and after neurosurgical operations.

[0701] Within one aspect of the present invention, polynucleotides, polypeptides, agonists and/or agonists may be administered to the resection margin of a wide variety of tumors, including for example, breast, colon, brain and hepatic tumors. For example, within one embodiment of the invention, anti-angiogenic compounds may be administered to the site of a neurological tumor subsequent to excision, such that the formation of new blood vessels at the site are inhibited.

[0702] The polynucleotides, polypeptides, agonists and/or agonists of the present invention may also be administered along with other anti-angiogenic factors. Representative examples of other anti-angiogenic factors include: Anti-Invasive Factor, retinoic acid and derivatives thereof, paclitaxel, Suramin, Tissue Inhibitor of Metalloproteinase-1, Tissue Inhibitor of Metalloproteinase-2, Plasminogen Activator Inhibitor-1, Plasminogen Activator Inhibitor-2, and various forms of the lighter “d group” transition metals.

[0703] Lighter “d group” transition metals include, for example, vanadium, molybdenum, tungsten, titanium, niobium, and tantalum species. Such transition metal species may form transition metal complexes. Suitable complexes of the above-mentioned transition metal species include oxo transition metal complexes.

[0704] Representative examples of vanadium complexes include oxo vanadium complexes such as vanadate and vanadyl complexes. Suitable vanadate complexes include metavanadate and orthovanadate complexes such as, for example, ammonium metavanadate, sodium metavanadate, and sodium orthovanadate. Suitable vanadyl complexes include, for example, vanadyl acetylacetonate and vanadyl sulfate including vanadyl sulfate hydrates such as vanadyl sulfate mono- and trihydrates.

[0705] Representative examples of tungsten and molybdenum complexes also include oxo complexes. Suitable oxo tungsten complexes include tungstate and tungsten oxide complexes. Suitable tungstate complexes include ammonium tungstate, calcium tungstate, sodium tungstate dihydrate, and tungstic acid. Suitable tungsten oxides include tungsten (IV) oxide and tungsten (VI) oxide. Suitable oxo molybdenum complexes include molybdate, molybdenum oxide, and molybdenyl complexes. Suitable molybdate complexes include ammonium molybdate and its hydrates, sodium molybdate and its hydrates, and potassium molybdate and its hydrates. Suitable molybdenum oxides include molybdenum (VI) oxide, molybdenum (VI) oxide, and molybdic acid. Suitable molybdenyl complexes include, for example, molybdenyl acetylacetonate. Other suitable tungsten and molybdenum complexes include hydroxo derivatives derived from, for example, glycerol, tartaric acid, and sugars.

[0706] A wide variety of other anti-angiogenic factors may also be utilized within the context of the present invention. Representative examples include platelet factor 4; protamine sulphate; sulphated chitin derivatives (prepared from queen crab shells), (Murata et al., Cancer Res. 51:22-26 (1991)); Sulphated Polysaccharide Peptidoglycan Complex (SP-PG) (the function of this compound may be enhanced by the presence of steroids such as estrogen, and tamoxifen citrate); Staurosporine; modulators of matrix metabolism, including for example, proline analogs, cishydroxyproline, d,L-3,4-dehydroproline, Thiaproline, alpha,alpha-dipyridyl, aminopropionitrile fumarate; 4-propyl-5-(4-pyridinyl)-2(3 F)-oxazolone; Methotrexate; Mitoxantrone; Heparin; Interferons; 2 Macroglobulin-serum; ChIMP-3 (Pavloff et al., J. Bio. Chem. 267:17321-17326 (1992)); Chymostatin (Tomkinson et al., Biochem J. 286:475-480 (1992)); Cyclodextrin Tetradecasulfate; Eponemycin; Camptothecin; Fumagillin (Ingber et al., Nature 348:555-557 (1990)); Gold Sodium Thiomalate (“GST”; Matsubara and Ziff, J. Clin. Invest. 79:1440-1446 (1987)); anticollagenase-serum; alpha2-antiplasmin (Holmes et al., J. Biol. Chem. 262(4):1659-1664 (1987)); Bisantrene (National Cancer Institute); Lobenzarit disodium (N-(2)-carboxyphenyl-4-chloroanthronilic acid disodium or “CCA”; Takeuchi et al., Agents Actions 36:312-316, 1992); Thalidomide; Angostatic steroid; AGM-1470; carboxynaminolmidazole; and metalloproteinase inhibitors such as BB94.

[0707] Musculoskeletal System Disorders

[0708] Polynucleotides, polypeptides, antibodies, and/or agonists or antagonists of the present invention, may be used to treat, prevent, diagnose, and/or prognose disorders of the musculoskeletal system, including but not limited to, disorders of the bone, joints, ligaments, tendons, bursa, muscle, and/or neoplasms and cancers associated with musculoskeletal tissue.

[0709] Diseases or disorders of the bone include, but are not limited to, Albers-Schönberg disease, bowlegs, heel spurs, Kohler's bone disease, knock-knees, Legg-Calvé-Perthes disease, Marfan's syndrome, mucopolysaccharidoses, Osgood-Schlatter disease, osteochondroses, osteochondrodysplasia, osteomyelitis, osteopetroses, osteoporosis (postmenopausal, senile, and juvenile), Paget's disease, Scheuermann's disease, scoliosis, Sever's disease, and patellofemoral stress syndrome.

[0710] Joint diseases or disorders include, but are not limited to, ankylosing spondylitis, Behcet's syndrome, CREST syndrome, Ehlers-Danlos syndrome, infectious arthritis, discoid lupus erythematosus, systemic lupus erythematosus, Lyme disease, osteoarthritis, psoriatic arthritis, relapsing polychondrites, Reiter's syndrome, rheumatoid arthritis (adult and juvenile), scleroderma, and Still's disease.

[0711] Diseases or disorders affecting ligaments, tendons, or bursa include, but are not limited to, ankle sprain, bursitis, posterior Achilles tendon bursitis (Haglund's deformity), antcrior Achilles tendon bursitis (Albert's disease), tendinitis, tenosynovitis, poplieus tendinitis, Achilles tendinitis, medial or lateral epicondylitis, rotator cuff tendinitis, spasmodic torticollis, and fibromyalgia syndrome.

[0712] Muscle diseases or disorders include, but are not limited to, Becker's muscular dystrophy, Duchenne's muscular dystrophy, Landouzy-Dejerine muscular dystrophy, Leyden-Mobius muscular dystrophy, Erb's muscular dystrophy, Charcot's joints, dermatomyositis, gout, pseudogout, glycogen storage diseases, Pompe's disease, mitochondrial myopathy, periodic paralysis, polymyalgia rheumatica, polymyositis, Steinert's disease, Thomsen's disease, anterolateral and posteromedial shin splints, posterior femoral muscle strain, and fibromyositis.

[0713] Musculoskeletal tissue may also develop cancers and/or neoplasms that include, but are not limited to, osteochondroma, benign chondroma, chondroblastoma, chondromyxoid fibroma, osteoid osteoma, giant cell tumor, multiple myeloma, osteosarcoma, fibrosarcoma, malignant fibrous histiocytoma, chondrosarcoma, Ewing's tumor, and malignant lymphoma of bone.

[0714] Neural Activity and Neurological Diseases

[0715] The polynucleotides, polypeptides and agonists or antagonists of the invention may be used for the diagnosis and/or treatment of diseases, disorders, damage or injury of the brain and/or nervous system. Nervous system disorders that can be treated with the compositions of the invention (e.g., polypeptides, polynucleotides, and/or agonists or antagonists), include, but are not limited to, nervous system injuries, and diseases or disorders which result in either a disconnection of axons, a diminution or degeneration of neurons, or demyelination. Nervous system lesions which may be treated in a patient (including human and non-human mammalian patients) according to the methods of the invention, include but are not limited to, the following lesions of either the central (including spinal cord, brain) or peripheral nervous systems: (1) ischemic lesions, in which a lack of oxygen in a portion of the nervous system results in neuronal injury or death, including cerebral infarction or ischemia, or spinal cord infarction or ischemia; (2) traumatic lesions, including lesions caused by physical injury or associated with surgery, for example, lesions which sever a portion of the nervous system, or compression injuries; (3) malignant lesions, in which a portion of the nervous system is destroyed or injured by malignant tissue which is either a nervous system associated malignancy or a malignancy derived from non-nervous system tissue; (4) infectious lesions, in which a portion of the nervous system is destroyed or injured as a result of infection, for example, by an abscess or associated with infection by human immunodeficiency virus, herpes zoster, or herpes simplex virus or with Lyme disease, tuberculosis, or syphilis; (5) degenerative lesions, in which a portion of the nervous system is destroyed or injured as a result of a degenerative process including but not limited to, degeneration associated with Parkinson's disease, Alzheimer's disease, Huntington's chorea, or amyotrophic lateral sclerosis (ALS); (6) lesions associated with nutritional diseases or disorders, in which a portion of the nervous system is destroyed or injured by a nutritional disorder or disorder of metabolism including, but not limited to, vitamin B12 deficiency, folic acid deficiency, Wernicke disease, tobacco-alcohol amblyopia, Marchiafava-Bignami disease (primary degeneration of the corpus callosum), and alcoholic cerebellar degeneration; (7) neurological lesions associated with systemic diseases including, but not limited to, diabetes (diabetic neuropathy, Bell's palsy), systemic lupus erythematosus, carcinoma, or sarcoidosis; (8) lesions caused by toxic substances including alcohol, lead, or particular neurotoxins; and (9) demyelinated lesions in which a portion of the nervous system is destroyed or injured by a demyelinating disease including, but not limited to, multiple sclerosis, human immunodeficiency virus-associated myelopathy, transverse myelopathy or various etiologies, progressive multifocal leukoencephalopathy, and central pontine myelinolysis.

[0716] In one embodiment, the polypeptides, polynucleotides, or agonists or antagonists of the invention are used to protect neural cells from the damaging effects of hypoxia. In a further preferred embodiment, the polypeptides, polynucleotides, or agonists or antagonists of the invention are used to protect neural cells from the damaging effects of cerebral hypoxia. According to this embodiment, the compositions of the invention are used to treat or prevent neural cell injury associated with cerebral hypoxia. In one non-exclusive aspect of this embodiment, the polypeptides, polynucleotides, or agonists or antagonists of the invention, are used to treat or prevent neural cell injury associated with cerebral ischemia. In another non-exclusive aspect of this embodiment, the polypeptides, polynucleotides, or agonists or antagonists of the invention are used to treat or prevent neural cell injury associated with cerebral infarction.

[0717] In another preferred embodiment, the polypeptides, polynucleotides, or agonists or antagonists of the invention are used to treat or prevent neural cell injury associated with a stroke. In a specific, embodiment, the polypeptides, polynucleotides, or agonists or antagonists of the invention are used to treat or prevent cerebral neural cell injury associated with a stroke.

[0718] In another preferred embodiment, the polypeptides, polynucleotides, or agonists or antagonists of the invention are used to treat or prevent neural cell injury associated with a heart attack. In a specific embodiment, the polypeptides, polynucleotides, or agonists or antagonists of the invention are used to treat or prevent cerebral neural cell injury associated with a heart attack.

[0719] The compositions of the invention which are useful for treating or preventing a nervous system disorder may be selected by testing for biological activity in promoting the survival or differentiation of neurons. For example, and not by way of limitation, compositions of the invention which elicit any of the following effects may be useful according to the invention: (1) increased survival time of neurons in culture either in the presence or absence of hypoxia or hypoxic conditions; (2) increased sprouting of neurons in culture or in vivo; (3) increased production of a neuron-associated molecule in culture or in vivo, e.g., choline acetyltransferase or acetylcholinesterase with respect to motor neurons; or (4) decreased symptoms of neuron dysfunction in vivo. Such effects may be measured by any method known in the art. In preferred, non-limiting embodiments, increased survival of neurons may routinely be measured using a method set forth herein or otherwise known in the art, such as, for example, in Zhang et al., Proc Natl Acad Sci USA 97:3637-42 (2000) or in Arakawa et al., J. Neurosci., 10:3507-15 (1990); increased sprouting of neurons may be detected by methods known in the art, such as, for example, the methods set forth in Pestronk et al., Exp. Neurol., 70:65-82 (1980), or Brown et al., Ann. Rev. Neurosci., 4:17-42 (1981); increased production of neuron-associated molecules may be measured by bioassay, enzymatic assay, antibody binding, Northern blot assay, etc., using techniques known in the art and depending on the molecule to be measured; and motor neuron dysfunction may be measured by assessing the physical manifestation of motor neuron disorder, e.g., weakness, motor neuron conduction velocity, or functional disability.

[0720] In specific embodiments, motor neuron disorders that may be treated according to the invention include, but are not limited to, disorders such as infarction, infection, exposure to toxin, trauma, surgical damage, degenerative disease or malignancy that may affect motor neurons as well as other components of the nervous system, as well as disorders that selectively affect neurons such as amyotrophic lateral sclerosis, and including, but not limited to, progressive spinal muscular atrophy, progressive bulbar palsy, primary lateral sclerosis, infantile and juvenile muscular atrophy, progressive bulbar paralysis of childhood (Fazio-Londe syndrome), poliomyelitis and the post polio syndrome, and Hereditary Motorsensory Neuropathy (Charcot-Marie-Tooth Disease).

[0721] Further, polypeptides or polynucleotides of the invention may play a role in neuronal survival; synapse formation; conductance; neural differentiation, etc. Thus, compositions of the invention (including polynucleotides, polypeptides, and agonists or antagonists) may be used to diagnose and/or treat or prevent diseases or disorders associated with these roles, including, but not limited to, learning and/or cognition disorders. The compositions of the invention may also be useful in the treatment or prevention of neurodegenerative disease states and/or behavioural disorders. Such neurodegenerative disease states and/or behavioral disorders include, but are not limited to, Alzheimer's Disease, Parkinson's Disease, Huntington's Disease, Tourette Syndrome, schizophrenia, mania, dementia, paranoia, obsessive compulsive disorder, panic disorder, learning disabilities, ALS, psychoses, autism, and altered behaviors, including disorders in feeding, sleep patterns, balance, and perception. In addition, compositions of the invention may also play a role in the treatment, prevention and/or detection of developmental disorders associated with the developing embryo, or sexually-linked disorders.

[0722] Additionally, polypeptides, polynucleotides and/or agonists or antagonists of the invention, may be useful in protecting neural cells from diseases, damage, disorders, or injury, associated with cerebrovascular disorders including, but not limited to, carotid artery diseases (e.g., carotid artery thrombosis, carotid stenosis, or Moyamoya Disease), cerebral amyloid angiopathy, cerebral aneurysm, cerebral anoxia, cerebral arteriosclerosis, cerebral arteriovenous malformations, cerebral artery diseases, cerebral embolism and thrombosis (e.g., carotid artery thrombosis, sinus thrombosis, or Wallenberg's Syndrome), cerebral hemorrhage (e.g., epidural or subdural hematoma, or subarachnoid hemorrhage), cerebral infarction, cerebral ischemia (e.g., transient cerebral ischemia, Subclavian Steal Syndrome, or vertebrobasilar insufficiency), vascular dementia (e.g., multi-infarct), leukomalacia, periventricular, and vascular headache (e.g., cluster headache or migraines).

[0723] In accordance with yet a further aspect of the present invention, there is provided a process for utilizing polynucleotides or polypeptides, as well as agonists or antagonists of the present invention, for therapeutic purposes, for example, to stimulate neurological cell proliferation and/or differentiation. Therefore, polynucleotides, polypeptides, agonists and/or antagonists of the invention may be used to treat and/or detect neurologic diseases. Moreover, polynucleotides or polypeptides, or agonists or antagonists of the invention, can be used as a marker or detector of a particular nervous system disease or disorder.

[0724] Examples of neurologic diseases which can be treated or detected with polynucleotides, polypeptides, agonists, and/or antagonists of the present invention include brain diseases, such as metabolic brain diseases which includes phenylketonuria such as maternal phenylketonuria, pyruvate carboxylase deficiency, pyruvate dehydrogenase complex deficiency, Wernicke's Encephalopathy, brain edema, brain neoplasms such as cerebellar neoplasms which include infratentorial neoplasms, cerebral ventricle neoplasms such as choroid plexus neoplasms, hypothalamic neoplasms, supratentorial neoplasms, canavan disease, cerebellar diseases such as cerebellar ataxia which include spinocerebellar degeneration such as ataxia telangiectasia, cerebellar dyssynergia, Friederich's Ataxia, Machado-Joseph Disease, olivopontocerebellar atrophy, cerebellar neoplasms such as infratentorial neoplasms, diffuse cerebral sclerosis such as encephalitis periaxialis, globoid cell leukodystrophy, metachromatic leukodystrophy and subacute sclerosing panencephalitis.

[0725] Additional neurologic diseases which can be treated or detected with polynucleotides, polypeptides, agonists, and/or antagonists of the present invention include cerebrovascular disorders (such as carotid artery diseases which include carotid artery thrombosis, carotid stenosis and Moyamoya Disease), cerebral amyloid angiopathy, cerebral aneurysm, cerebral anoxia, cerebral arteriosclerosis, cerebral arteriovenous malformations, cerebral artery diseases, cerebral embolism and thrombosis such as carotid artery thrombosis, sinus thrombosis and Wallenberg's Syndrome, cerebral hemorrhage such as epidural hematoma, subdural hematoma and subarachnoid hemorrhage, cerebral infarction, cerebral ischemia such as transient cerebral ischemia, Subclavian Steal Syndrome and vertebrobasilar insufficiency, vascular dementia such as multi-infarct dementia, periventricular leukomalacia, vascular headache such as cluster headache and migraine.

[0726] Additional neurologic diseases which can be treated or detected with polynucleotides, polypeptides, agonists, and/or antagonists of the present invention include dementia such as AIDS Dementia Complex, presenile dementia such as Alzheimer's Disease and Creutzfeldt-Jakob Syndrome, senile dementia such as Alzheimer's Disease and progressive supranuclear palsy, vascular dementia such as multi-infarct dementia, encephalitis which include encephalitis periaxialis, viral encephalitis such as epidemic encephalitis, Japanese Encephalitis, St. Louis Encephalitis, tick-borne encephalitis and West Nile Fever, acute disseminated encephalomyelitis, meningoencephalitis such as uveomeningoencephalitic syndrome, Postencephalitic Parkinson Disease and subacute sclerosing panencephalitis, encephalomalacia such as periventricular leukomalacia, epilepsy such as generalized epilepsy which includes infantile spasms, absence epilepsy, myoclonic epilepsy which includes MERRF Syndrome, tonic-clonic epilepsy, partial epilepsy such as complex partial epilepsy, frontal lobe epilepsy and temporal lobe epilepsy, post-traumatic epilepsy, status epilepticus such as Epilepsia Partialis Continua, and Hallervorden-Spatz Syndrome.

[0727] Additional neurologic diseases which can be treated or detected with polynucleotides, polypeptides, agonists, and/or antagonists of the present invention include hydrocephalus such as Dandy-Walker Syndrome and normal pressure hydrocephalus, hypothalamic diseases such as hypothalamic neoplasms, cerebral malaria, narcolepsy which includes cataplexy, bulbar poliomyelitis, cerebri pseudotumor, Rett Syndrome, Reye's Syndrome, thalamic diseases, cerebral toxoplasmosis, intracranial tuberculoma and Zellweger Syndrome, central nervous system infections such as AIDS Dementia Complex, Brain Abscess, subdural empyema, encephalomyelitis such as Equine Encephalomyelitis, Venezuelan Equine Encephalomyelitis, Necrotizing Hemorrhagic Encephalomyelitis, Visna, and cerebral malaria.

[0728] Additional neurologic diseases which can be treated or detected with polynucleotides, polypeptides, agonists, and/or antagonists of the present invention include meningitis such as arachnoiditis, aseptic meningtitis such as viral meningtitis which includes lymphocytic choriomeningitis, Bacterial meningtitis which includes Haemophilus Meningtitis, Listeria Meningtitis, Meningococcal Meningtitis such as Waterhouse-Friderichsen Syndrome, Pneumococcal Meningtitis and meningeal tuberculosis, fungal meningitis such as Cryptococcal Meningtitis, subdural effusion, meningoencephalitis such as uvemeningoencephalitic syndrome, myelitis such as transverse myelitis, neurosyphilis such as tabes dorsalis, poliomyelitis which includes bulbar poliomyelitis and postpoliomyelitis syndrome, prion diseases (such as Creutzfeldt-Jakob Syndrome, Bovine Spongiform Encephalopathy, Gerstmann-Straussler Syndrome, Kuru, Scrapie), and cerebral toxoplasmosis.

[0729] Additional neurologic diseases which can be treated or detected with polynucleotides, polypeptides, agonists, and/or antagonists of the present invention include central nervous system neoplasms such as brain neoplasms that include cerebellar neoplasms such as infratentorial neoplasms, cerebral ventricle neoplasms such as choroid plexus neoplasms, hypothalamic neoplasms and supratentorial neoplasms, meningeal neoplasms, spinal cord neoplasms which include epidural neoplasms, demyelinating diseases such as Canavan Diseases, diffuse cerebral sceloris which includes adrenoleukodystrophy, encephalitis periaxialis, globoid cell leukodystrophy, diffuse cerebral sclerosis such as metachromatic leukodystrophy, allergic encephalomyelitis, necrotizing hemorrhagic encephalomyelitis, progressive multifocal leukoencephalopathy, multiple sclerosis, central pontine myelinolysis, transverse myelitis, neuromyelitis optica, Scrapie, Swayback, Chronic Fatigue Syndrome, Visna, High Pressure Nervous Syndrome, Meningism, spinal cord diseases such as amyotonia congenita, amyotrophic lateral sclerosis, spinal muscular atrophy such as Werdnig-Hoffmann Disease, spinal cord compression, spinal cord neoplasms such as epidural neoplasms, syringomyelia, Tabes Dorsalis, Stiff-Man Syndrome, mental retardation such as Angelman Syndrome, Cri-du-Chat Syndrome, De Lange's Syndrome, Down Syndrome, Gangliosidoses such as gangliosidoses G(M1), Sandhoff Disease, Tay-Sachs Disease, Hartnup Disease, homocystinuria, Laurence-Moon-Biedl Syndrome, Lesch-Nyhan Syndrome, NIaple Syrup Urine Disease, mucolipidosis such as fucosidosis, neuronal ceroid-lipofuscinosis, oculocerebrorenal syndrome, phenylketonuria such as maternal phenylketonuria, Prader-Willi Syndrome, Rett Syndrome, Rubinstein-Taybi Syndrome, Tuberous Sclerosis, WAGR Syndrome, nervous system abnormalities such as holoprosencephaly, neural tube defects such as anencephaly which includes hydrangencephaly, Arnold-Chairi Deformity, encephalocele, meningocele, meningomyelocele, spinal dysraphism such as spina bifida cystica and spina bifida occulta.

[0730] Additional neurologic diseases which can be treated or detected with polynucleotides, polypeptides, agonists, and/or antagonists of the present invention include hereditary motor and sensory neuropathies which include Charcot-Marie Disease, Hereditary optic atrophy, Refsum's Disease, hereditary spastic paraplegia, Werdnig-Hoffmann Disease, Hereditary Sensory and Autonomic Neuropathies such as Congenital Analgesia and Familial Dysautonomia, Neurologic manifestations (such as agnosia that include Gerstmann's Syndrome, Amnesia such as retrograde amnesia, apraxia, neurogenic bladder, cataplexy, communicative disorders such as hearing disorders that includes deafness, partial hearing loss, loudness recruitment and tinnitus, language disorders such as aphasia which include agraphia, anomia, broca aphasia, and Wernicke Aphasia, Dyslexia such as Acquired Dyslexia, language development disorders, speech disorders such as aphasia which includes anomia, broca aphasia and Wernicke Aphasia, articulation disorders, communicative disorders such as speech disorders which include dysarthria, echolalia, mutism and stuttering, voice disorders such as aphonia and hoarseness, decerebrate state, delirium, fasciculation, hallucinations, meningism, movement disorders such as angelman syndrome, ataxia, athetosis, chorea, dystonia, hypokinesia, muscle hypotonia, myoclonus, tic, torticollis and tremor, muscle hypertonia such as muscle rigidity such as stiff-man syndrome, muscle spasticity, paralysis such as facial paralysis which includes Herpes Zoster Oticus, Gastroparesis, Hemiplegia, ophthalmoplegia such as diplopia, Duane's Syndrome, Homer's Syndrome, Chronic progressive external ophthalmoplegia such as Kearns Syndrome, Bulbar Paralysis, Tropical Spastic Paraparesis, Paraplegia such as Brown-Sequard Syndrome, quadriplegia, respiratory paralysis and vocal cord paralysis, paresis, phantom limb, taste disorders such as ageusia and dysgeusia, vision disorders such as amblyopia, blindness, color vision defects, diplopia, hemianopsia, scotoma and subnormal vision, steep disorders such as hypersomnia which includes Kleine-Levin Syndrome, insomnia, and somnambulism, spasm such as trismus, unconsciousness such as coma, persistent vegetative state and syncope and vertigo, neuromuscular diseases such as amyotonia congenita, amyotrophic lateral sclerosis, Lambert-Eaton Myasthenic Syndrome, motor neuron disease, muscular atrophy such as spinal muscular atrophy, Charcot-Marie Disease and Werdnig-Hoffmann Disease, Postpoliomyelitis Syndrome, Muscular Dystrophy, Myasthenia Gravis, Myotonia Atrophica, Myotonia Confenita, Nemaline Myopathy, Familial Periodic Paralysis, Multiplex Paramyloclonus, Tropical Spastic Paraparesis and Stiff-Man Syndrome, peripheral nervous system diseases such as acrodynia, amyloid neuropathies, autonomic nervous system diseases such as Adie's Syndrome, Barre-Lieou Syndrome, Familial Dysautonomia, Homer's Syndrome, Reflex Sympathetic Dystrophy and Shy-Drager Syndrome, Cranial Nerve Diseases such as Acoustic Nerve Diseases such as Acoustic Neuroma which includes Neurofibromatosis 2, Facial Nerve Diseases such as Facial Neuralgia, Melkersson-Rosenthal Syndrome, ocular motility disorders which includes amblyopia, nystagmus, oculomotor nerve paralysis, ophthalmoplegia such as Duane's Syndrome, Horner's Syndrome, Chronic Progressive External Ophthalmoplegia which includes Kearns Syndrome, Strabismus such as Esotropia and Exotropia, Oculomotor Nerve Paralysis, Optic Nerve Diseases such as Optic Atrophy which includes Hereditary Optic Atrophy, Optic Disk Drusen, Optic Neuritis such as Neuromyelitis Optica, Papilledema, Trigeminal Neuralgia, Vocal Cord Paralysis, Demyelinating Diseases such as Neuromyelitis Optica and Swayback, and Diabetic neuropathies such as diabetic foot.

[0731] Additional neurologic diseases which can be treated or detected with polynucleotides, polypeptides, agonists, and/or antagonists of the present invention include nerve compression syndromes such as carpal tunnel syndrome, tarsal tunnel syndrome, thoracic outlet syndrome such as cervical rib syndrome, ulnar nerve compression syndrome, neuralgia such as causalgia, cervico-brachial neuralgia, facial neuralgia and trigeminal neuralgia, neuritis such as experimental allergic neuritis, optic neuritis, polyneuritis, polyradiculoneuritis and radiculities such as polyradiculitis, hereditary motor and sensory neuropathies such as Charcot-Marie Disease, Hereditary Optic Atrophy, Refsum's Disease, Hereditary Spastic Paraplegia and Werdnig-Hoffmann Disease, Hereditary Sensory and Autonomic Neuropathies which include Congenital Analgesia and Familial Dysautonomia, POEMS Syndrome, Sciatica, Gustatory Sweating and Tetany).

[0732] Gastrointestinal Disorders

[0733] Polynucleotides or polypeptides, or agonists or antagonists of the present invention, may be used to treat, prevent, diagnose, and/or prognose gastrointestinal disorders, including inflammatory diseases and/or conditions, infections, cancers (e.g., intestinal neoplasms (carcinoid tumor of the small intestine, non-Hodgkin's lymphoma of the small intestine, small bowl lymphoma)), and ulcers, such as peptic ulcers.

[0734] Gastrointestinal disorders include dysphagia, odynophagia, inflammation of the esophagus, peptic esophagitis, gastric reflux, submucosal fibrosis and stricturing, Mallory-Weiss lesions, leiomyomas, lipomas, epidermal cancers, adeoncarcinomas, gastric retention disorders, gastroenteritis, gastric atrophy, gastric/stomach cancers, polyps of the stomach, autoimmune disorders such as pernicious anemia, pyloric stenosis, gastritis (bacterial, viral, eosinophilic, stress-induced, chronic erosive, atrophic, plasma cell, and Ménétrier's), and peritoneal diseases (e.g., chyloperioneum, hemoperitoneum, mesenteric cyst, mesenteric lymphadenitis, mesenteric vascular occlusion, panniculitis, neoplasms, peritonitis, pneumoperitoneum, bubphrenic abscess).

[0735] Gastrointestinal disorders also include disorders associated with the small intestine, such as malabsorption syndromes, distension, irritable bowel syndrome, sugar intolerance, celiac disease, duodenal ulcers, duodenitis, tropical sprue, Whipple's disease, intestinal lymphangiectasia, Crohn's disease, appendicitis, obstructions of the ileum, Meckel's diverticulum, multiple diverticula, failure of complete rotation of the small and large intestine, lymphoma, and bacterial and parasitic diseases (such as Traveler's diarrhea, typhoid and paratyphoid, cholera, infection by Roundworms (Ascariasis lumbricoides), Hookworms (Ancylostoma duodenale), Threadworms (Enterobius vermicularis), Tapeworms (Taenia saginata, Echinococcus granulosus, Diphyllobothrium spp., and T. solium).

[0736] Liver diseases and/or disorders include intrahepatic cholestasis (alagille syndrome, biliary liver cirrhosis), fatty liver (alcoholic fatty liver, reye syndrome), hepatic vein thrombosis, hepatolentricular degeneration, hepatomegaly, hepatopulmonary syndrome, hepatorenal syndrome, portal hypertension (esophageal and gastric varices), liver abscess (amebic liver abscess), liver cirrhosis (alcoholic, biliary and experimental), alcoholic liver diseases (fatty liver, hepatitis, cirrhosis), parasitic (hepatic echinococcosis, fascioliasis, amebic liver abscess), jaundice (hemolytic, hepatocellular, and cholestatic), cholestasis, portal hypertension, liver enlargement, ascites, hepatitis (alcoholic hepatitis, animal hepatitis, chronic hepatitis (autoimmune, hepatitis B, hepatitis C, hepatitis D, drug induced), toxic hepatitis, viral human hepatitis (hepatitis A, hepatitis B, hepatitis C, hepatitis D, hepatitis E), Wilson's disease, granulomatous hepatitis, secondary biliary cirrhosis, hepatic encephalopathy, portal hypertension, varices, hepatic encephalopathy, primary biliary cirrhosis, primary sclerosing cholangitis, hepatocellular adenoma, hemangiomas, bile stones, liver failure (hepatic encephalopathy, acute liver failure), and liver neoplasms (angiomyolipoma, calcified liver metastases, cystic liver metastases, epithelial tumors, fibrolamellar hepatocarcinoma, focal nodular hyperplasia, hepatic adenoma, hepatobiliary cystadenoma, hepatoblastoma, hepatocellular carcinoma, hepatoma, liver cancer, liver hemangioendothelioma, mesenchymal hamartoma, mesenchymal tumors of liver, nodular regenerative hyperplasia, benign liver tumors (Hepatic cysts [Simple cysts, Polycystic liver disease, Hepatobiliary cystadenoma, Choledochal cyst], Mesenchymal tumors [Mesenchymal hamartoma, Infantile hemangioendothelioma, Hemangioma, Peliosis hepatis, Lipomas, Inflammatory pseudotumor, Miscellaneous], Epithelial tumors [Bile duct epithelium (Bile duct hamartoma, Bile duct adenoma), Hepatocyte (Adenoma, Focal nodular hyperplasia, Nodular regenerative hyperplasia)], malignant liver tumors [hepatocellular, hepatoblastoma, hepatocellular carcinoma, cholangiocellular, cholangiocarcinoma, cystadenocarcinoma, tumors of blood vessels, angiosarcoma, Karposi's sarcoma, hemangioendothelioma, other tumors, embryonal sarcoma, fibrosarcoma, leiomyosarcoma, rhabdomyosarcoma, carcinosarcoma, teratoma, carcinoid, squamous carcinoma, primary lymphoma]), peliosis hepatis, erythrohepatic porphyria, hepatic porphyria (acute intermittent porphyria, porphyria cutanea tarda), Zellweger syndrome).

[0737] Pancreatic diseases and/or disorders include acute pancreatitis, chronic pancreatitis (acute necrotizing, pancreatitis, alcoholic pancreatitis), neoplasms (adenocarcinoma of the pancreas, cystadenocarcinoma, insulinoma, gastrinoma, and glucagonoma, cystic neoplasms, islet-cell tumors, pancreoblastoma), and other pancreatic diseases (e.g., cystic fibrosis, cyst (pancreatic pseudocyst, pancreatic fistula, insufficiency)).

[0738] Gallbladder diseases include gallstones (cholelithiasis and choledocholithiasis), postcholecystectomy syndrome, diverticulosis of the gallbladder, acute cholecystitis, chronic cholecystitis, bile duct tumors, and mucocele.

[0739] Diseases and/or disorders of the large intestine include antibiotic-associated colitis, diverticulitis, ulcerative colitis, acquired megacolon, abscesses, fungal and bacterial infections, anorectal disorders (e.g., fissures, hemorrhoids), colonic diseases (colitis, colonic neoplasms [colon cancer, adenomatous colon polyps (e.g., villous adenoma), colon carcinoma, colorectal cancer], colonic diverticulitis, colonic diverticulosis, megacolon [Hirschsprung disease, toxic megacolon]; sigmoid diseases [proctocolitis, sigmoin neoplasms]), constipation, Crohn's disease, diarrhea (infantile diarrhea, dysentery), duodenal diseases (duodenal neoplasms, duodenal obstruction, duodenal ulcer, duodenitis), enteritis (enterocolitis), HIV enteropathy, ileal diseases (ileal neoplasms, ileitis), immunoproliferative small intestinal disease, inflammatory bowel disease (ulcerative colitis, Crohn's disease), intestinal atresia, parasitic diseases (anisakiasis, balantidiasis, blastocystis infections, cryptosporidiosis, dientamoebiasis, amebic dysentery, giardiasis), intestinal fistula (rectal fistula), intestinal neoplasms (cecal neoplasms, colonic neoplasms, duodenal neoplasms, ileal neoplasms, intestinal polyps, jejunal neoplasms, rectal neoplasms), intestinal obstruction (afferent loop syndrome, duodenal obstruction, impacted feces, intestinal pseudo-obstruction [cecal volvulus], intussusception), intestinal perforation, intestinal polyps (colonic polyps, gardner syndrome, peutzjeghers syndrome), jejunal diseases (jejunal neoplasms), malabsorption syndromes (blind loop syndrome, celiac disease, lactose intolerance, short bowl syndrome, tropical sprue, whipple's disease), mesenteric vascular occlusion, pneumatosis cystoides intestinalis, protein-losing enteropathies (intestinal lymphagiectasis), rectal diseases (anus diseases, fecal incontinence, hemorrhoids, proctitis, rectal fistula, rectal prolapse, rectocele), peptic ulcer (duodenal ulcer, peptic esophagitis, hemorrhage, perforation, stomach ulcer, Zollinger-Ellison syndrome), postgastrectomy syndromes (dumping syndrome), stomach diseases (e.g., achlorhydria, duodenogastric reflux (bile reflux), gastric antral vascular ectasia, gastric fistula, gastric outlet obstruction, gastritis (atrophic or hypertrophic), gastroparesis, stomach dilatation, stomach diverticulum, stomach neoplasms (gastric cancer, gastric polyps, gastric adenocarcinoma, hyperplastic gastric polyp), stomach rupture, stomach ulcer, stomach volvulus), tuberculosis, visceroptosis, vomiting (e.g., hematemesis, hyperemesis gravidarum, postoperative nausea and vomiting) and hemorrhagic colitis.

[0740] Further diseases and/or disorders of the gastrointestinal system include biliary tract diseases, such as, gastroschisis, fistula (e.g., biliary fistula, esophageal fistula, gastric fistula, intestinal fistula, pancreatic fistula), neoplasms (e.g., biliary tract neoplasms, esophageal neoplasms, such as adenocarcinoma of the esophagus, esophageal squamous cell carcinoma, gastrointestinal neoplasms, pancreatic neoplasms, such as adenocarcinoma of the pancreas, mucinous cystic neoplasm of the pancreas, pancreatic cystic neoplasms, pancreatoblastoma, and peritoneal neoplasms), esophageal disease (e.g., bullous diseases, candidiasis, glycogenic acanthosis, ulceration, barrett esophagus varices, atresia, cyst, diverticulum (e.g., Zenker's diverticulum), fistula (e.g., tracheoesophageal fistula), motility disorders (e.g., CREST syndrome, deglutition disorders, achalasia, spasm, gastroesophageal reflux), neoplasms, perforation (e.g., Boerhaave syndrome, Mallory-Weiss syndrome), stenosis, esophagitis, diaphragmatic hernia (e.g., hiatal hernia); gastrointestinal diseases, such as, gastroenteritis (e.g., cholera morbus, norwalk virus infection), hemorrhage (e.g., hematemesis, melena, peptic ulcer hemorrhage), stomach neoplasms (gastric cancer, gastric polyps, gastric adenocarcinoma, stomach cancer)), hernia (e.g., congenital diaphragmatic hernia, femoral hernia, inguinal hernia, obturator hernia, umbilical hernia, ventral hernia), and intestinal diseases (e.g., cecal diseases (appendicitis, cecal neoplasms)).

[0741] Reproductive System Disorders

[0742] The polynucleotides or polypeptides, or agonists or antagonists of the invention may be used for the diagnosis, treatment, or prevention of diseases and/or disorders of the reproductive system. Reproductive system disorders that can be treated by the compositions of the invention, include, but are not limited to, reproductive system injuries, infections, neoplastic disorders, congenital defects, and diseases or disorders which result in infertility, complications with pregnancy, labor, or parturition, and postpartum difficulties.

[0743] Reproductive system disorders and/or diseases include diseases and/or disorders of the testes, including, but not limited to, testicular atrophy, testicular feminization, cryptorchism (unilateral and bilateral), anorchia, ectopic testis, epididymitis and orchitis (typically resulting from infections such as, for example, gonorrhea, mumps, tuberculosis, and syphilis), testicular torsion, vasitis nodosa, germ cell tumors (e.g., seminomas, embryonal cell carcinomas, teratocarcinomas, choriocarcinomas, yolk sac tumors, and teratomas), stromal tumors (e.g., Leydig cell tumors), hydrocele, hematocele, varicocele, spermatocele, inguinal hernia, and disorders of sperm production (e.g., immotile cilia syndrome, aspermia, asthenozoospermia, azoospermia, oligospermia, and teratozoospermia).

[0744] Reproductive system disorders also include, but are not limited to, disorders of the prostate gland, such as acute non-bacterial prostatitis, chronic non-bacterial prostatitis, acute bacterial prostatitis, chronic bacterial prostatitis, prostatodystonia, prostatosis, granulomatous prostatitis, malacoplakia, benign prostatic hypertrophy or hyperplasia, and prostate neoplastic disorders, including adenocarcinomas, transitional cell carcinomas, ductal carcinomas, and squamous cell carcinomas.

[0745] Additionally, the compositions of the invention may be useful in the diagnosis, treatment, and/or prevention of disorders or diseases of the penis and urethra, including, but not limited to, inflammatory disorders, such as balanoposthitis, balanitis xerotica obliterans, phimosis, paraphimosis, syphilis, herpes simplex virus, gonorrhea, non-gonococcal urethritis, chlamydia, mycoplasma, trichomonas, HIV, AIDS, Reiter's syndrome, condyloma acuminatum, condyloma latum, and pearly penile papules; urethral abnormalities, such as hypospadias, epispadias, and phimosis; premalignant lesions, including Erythroplasia of Queyrat, Bowen's disease, Bowenoid paplosis, giant condyloma of Buscke-Lowenstein, and varrucous carcinoma; penile cancers, including squamous cell carcinomas, carcinoma in situ, verrucous carcinoma, and disseminated penile carcinoma; urethral neoplastic disorders, including penile urethral carcinoma, bulbomembranous urethral carcinoma, and prostatic urethral carcinoma; and erectile disorders, such as priapism, Peyronie's disease, erectile dysfunction, and impotence.

[0746] Moreover, diseases and/or disorders of the vas deferens include, but are not limited to vasculititis and CBAVD (congenital bilateral absence of the vas deferens); additionally, the polynucleotides, polypeptides, and agonists or antagonists of the present invention may be used in the diagnosis, treatment, and/or prevention of diseases and/or disorders of the seminal vesicles, including but not limited to, hydatid disease, congenital chloride diarrhea, and polycystic kidney disease.

[0747] Other disorders and/or diseases of the male reproductive system that may be diagnosed, treated, and/or prevented with the compositions of the invention include, but are not limited to, Klinefelter's syndrome, Young's syndrome, premature ejaculation, diabetes mellitus, cystic fibrosis, Kartagener's syndrome, high fever, multiple sclerosis, and gynecomastia.

[0748] Further, the polynucleotides, polypeptides, and agonists or antagonists of the present invention may be used in the diagnosis, treatment, and/or prevention of diseases and/or disorders of the vagina and vulva, including, but not limited to, bacterial vaginosis, candida vaginitis, herpes simplex virus, chancroid, granuloma inguinale, lymphogranuloma venereum, scabies, human papillomavirus, vaginal trauma, vulvar trauma, adenosis, chlamydia vaginitis, gonorrhea, trichomonas vaginitis, condyloma acuminatum, syphilis, molluscum contagiosum, atrophic vaginitis, Paget's disease, lichen sclerosus, lichen planus, vulvodynia, toxic shock syndrome, vaginismus, vulvovaginitis, vulvar vestibulitis, and neoplastic disorders, such as squamous cell hyperplasia, clear cell carcinoma, basal cell carcinoma, melanomas, cancer of Bartholin's gland, and vulvar intraepithelial neoplasia.

[0749] Disorders and/or diseases of the uterus that may be diagnosed, treated, and/or prevented with the compositions of the invention include, but are not limited to, dysmenorrhea, retroverted uterus, endometriosis, fibroids, adenomyosis, anovulatory bleeding, amenorrhea, Cushing's syndrome, hydatidiform motes, Asherman's syndrome, premature menopause, precocious puberty, uterine polyps, dysfunctional uterine bleeding (e.g., due to aberrant hormonal signals), and neoplastic disorders, such as adenocarcinomas, keiomyosarcomas, and sarcomas. Additionally, the polypeptides, polynucleotides, or agonists or antagonists of the invention may be useful as a marker or detector of, as well as in the diagnosis, treatment, and/or prevention of congenital uterine abnormalities, such as bicornuate uterus, septate uterus, simple unicornuate uterus, unicornuate uterus with a noncavitary rudimentary horn, unicornuate uterus with a non-communicating cavitary rudimentary horn, unicornuate uterus with a communicating cavitary horn, arcuate uterus, uterine didelfus, and T-shaped uterus.

[0750] Ovarian diseases and/or disorders that may be diagnosed, treated, and/or prevented with the compositions of the invention include, but are not limited to, anovulation, polycystic ovary syndrome (Stein-Leventhal syndrome), ovarian cysts, ovarian hypofunction, ovarian insensitivity to gonadotropins, ovarian oyerproduction of androgens, right ovarian vein syndrome, amenorrhea, hirutism, and ovarian cancer (including, but not limited to, primary and secondary cancerous growth, Sertoli-Leydig tumors, endometriod carcinoma of the ovary, ovarian papillary serous adenocarcinoma, ovarian mucinous adenocarcinoma, and Ovarian Krukenberg tumors).

[0751] Cervical diseases and/or disorders that may be diagnosed, treated, and/or prevented with the compositions of the invention include, but are not limited to, cervicitis, chronic cervicitis, mucopurulent cervicitis, cervical dysplasia, cervical polyps, Nabothian cysts, cervical erosion, cervical incompetence, and cervical neoplasms (including, for example, cervical carcinoma, squamous metaplasia, squamous cell carcinoma, adenosquamous cell neoplasia, and columnar cell neoplasia).

[0752] Additionally, diseases and/or disorders of the reproductive system that may be diagnosed, treated, and/or prevented with the compositions of the invention include, but are not limited to, disorders and/or diseases of pregnancy, including miscarriage and stillbirth, such as early abortion, late abortion, spontaneous abortion, induced abortion, therapeutic abortion, threatened abortion, missed abortion, incomplete abortion, complete abortion, habitual abortion, missed abortion, and septic abortion; ectopic pregnancy, anemia, Rh incompatibility, vaginal bleeding during pregnancy, gestational diabetes, intrauterine growth retardation, polyhydramnios, HELLP syndrome, abruptio placentae, placenta previa, hyperemesis, preeclampsia, eclampsia, herpes gestationis, and urticaria of pregnancy. Additionally, the polynucleotides, polypeptides, and agonists or antagonists of the present invention may be used in the diagnosis, treatment, and/or prevention of diseases that can complicate pregnancy, including heart disease, heart failure, rheumatic heart disease, congenital heart disease, mitral valve prolapse, high blood pressure, anemia, kidney disease, infectious disease (e.g., rubella, cytomegalovirus, toxoplasmosis, infectious hepatitis, chlamydia, HIV, AIDS, and genital herpes), diabetes mellitus, Graves' disease, thyroiditis, hypothyroidism, Hashimoto's thyroiditis, chronic active hepatitis, cirrhosis of the liver, primary biliary cirrhosis, asthma, systemic lupus eryematosis, rheumatoid arthritis, myasthenia gravis, idiopathic thrombocytopenic purpura, appendicitis, ovarian cysts, gallbladder disorders, and obstruction of the intestine.

[0753] Complications associated with labor and parturition that may be diagnosed, treated, and/or prevented with the compositions of the invention include, but are not limited to, premature rupture of the membranes, pre-term labor, post-term pregnancy, postmaturity, labor that progresses too slowly, fetal distress (e.g., abnormal heart rate (fetal or maternal), breathing problems, and abnormal fetal position), shoulder dystocia, prolapsed umbilical cord, amniotic fluid embolism, and aberrant uterine bleeding.

[0754] Further, diseases and/or disorders of the postdelivery period, that may be diagnosed, treated, and/or prevented with the compositions of the invention, include, but are not limited to, endometritis, myometritis, parametritis, peritonitis, pelvic thrombophlebitis, pulmonary embolism, endotoxemia, pyelonephritis, saphenous thrombophlebitis, mastitis, cystitis, postpartum hemorrhage, and inverted uterus.

[0755] Other disorders and/or diseases of the female reproductive system that may be diagnosed, treated, and/or prevented by the polynucleotides, polypeptides, and agonists or antagonists of the present invention include, but are not limited to, Turner's syndrome, pseudohermaphroditism, premenstrual syndrome, pelvic inflammatory disease, pelvic congestion (vascular engorgement), frigidity, anorgasmia, dyspareunia, ruptured fallopian tube, and Mittelschmerz.

[0756] Developmental and Inherited Disorders

[0757] Polynuceotides or polypeptides, Qr agonists or antagonists of the present invention may be used to treat, prevent, diagnose, and/or prognose diseases associated with mixed fetal tissues, including, but not limited to, developmental and inherited disorders or defects of the nervous system, musculoskelelal system, execretory system, cardiovascular system, hematopoietic system, gastrointestinal system, reproductive system, and respiratory system. Compositions of the present invention may also be used to treat, prevent, diagnose, and/or prognose developmental and inherited disorders or defects associated with, but not limited to, skin, hair, visual, and auditory tissues, metabolism. Additionally, the compositions of the invention may be useful in the diagnosis, treatment, and/or prevention of disorders or diseases associated with, but not limited to, chromosomal or genetic abnormalities and hyperproliferation or neoplasia.

[0758] Disorders or defects of the nervous system associated with developmental or inherited abnormalities that may be diagnosed, treated, and/or prevented with the compostions of the invention include, but are not limited to, adrenoleukodystrophy, agenesis of corpus callosum, Alexander disease, anencephaly, Angelman syndrome, Arnold-Chiari deformity, Batten disease, Canavan disease, cephalic disorders, Charcot-Marie-Tooth disease, encephalocele, Friedreich's ataxia, Gaucher's disease, Gorlin syndrome, Hallervorden-Spatz disease, hereditary spastic paraplegia, Huntington disease, hydranencephaly, hydrocephalus, Joubert syndrome, Lesch-Nyhan syndrome, leukodystrophy, Menkes disease, microcephaly, Niemann-Pick Type C1, neurofibromatosis, porencephaly, progeria, proteus syndrome, Refsum disease, spina bifida, Sturge-Weber syndrome, Tay-Sachs disease, tuberous sclerosis, and von Hippel-Lindau disease.

[0759] Developmental and inherited disorders resulting in disorders or defects of the musculoskeletal system that may be diagnosed, treated, and/or prevented with the compositions of the invention include, but are not limited to, achondroplasia, atlanto-occipital fusion, arthrogryposis mulitplex congenita, autosomal recessive muscular dystrophy, Becker's muscular dystrophy, cerebral palsy, choanal atresia, cleft lip, cleft palate, clubfoot, congenital amputation, congenital dislocation of the hip, congenital torticollis, congenital scoliosis, dopa-repsonsive dystonia, Duchenne muscular dystrophy, early-onset generalized dystonia, femoral torsion, Gorlin syndrome, hypophosphatasia, Klippel-Feil syndrome, knee dislocation, myoclonic dystonia, myotonic dystrophy, nail-patella syndrome, osteogenesis imperfecta, paroxysmal dystonia, progeria, prune-belly syndrome, rapid-onset dystonia parkinsonism, scolosis, syndactyly, Treacher Collins' syndrome, velocardiofacial syndrome, and X-linked dystonia-parkinsonism.

[0760] Developmental or hereditary disorders or defects of the excretory system that may be diagnosed, treated, and/or prevented with the compositions of the invention include, but are not limited to, Alport's syndrome, Bartter's syndrome, bladder diverticula, bladder exstrophy, cystinuria, epispadias, Fanconi's syndrome, Hartnup disease, horseshoe kidney, hypospadias, kidney agenesis, kidney ectopia, kidney malrotation, Liddle's syndrome, medullary cystic disease, medullary sponge, multicystic kidney, kidney polycystic kidney disease, nail-patella syndrome, Potter's syndrome, urinary tract flow obstruction, vitamin D-resistant rickets, and Wilm's tumor.

[0761] Cardiovascular disorders or defects of developmental or hereditary origin that may be diagnosed, treated, and/or prevented with the compositions of the inventtion include, but are not limited to, aortic valve stenosis, atrial septal defects, artioventricular (A-V) canal defect, bicuspid aortic valve, coarctation or the aorta, dextrocardia, Ebstein's anomaly, Eisenmenger's complex, hypoplastic left heart syndrome, Marfan syndrome, patent ductus arteriosus, progeria, pulmonary atresia, pulmonary valve stenosis, subaortic stenosis, tetralogy of fallot, total anomalous pulmonary venous (P-V) connection, transposition of the great arteries, tricuspid atresia, truncus arteriosus, ventricular septal defects. Developmental or inherited disorders resulting in disorders involving the hematopoietic system that may be diagnosed, treated, and/or prevented with the compositions of the invention include, but not limited to, Bemard-Soulier syndrome, Chediak-Higashi syndrome, hemophilia, Herrnansky-Pudlak syndrome, sickle cell anemia, storage pool disease, thromboxane A2 dysfunction, thrombasthenia, and von Willebrand's disease.

[0762] The compositions of the invention may also be used to diagnose, treat, and/or prevent developmental and inherited disorders resulting in disorders or defects of the gastrointestinal system, including, but not limited to, anal atresia, biliary atresia, esophageal atresia, diaphragmatic hernia, Hirschsprung's disease, Meckel's diverticulum, oligohydramnios, omphalocele, polyhydramnios, porphyria, situs inversus viscera. Developmental or inherited disorders resulting in metabolic disorders that may be diagnosed, treated, and/or prevented with the compositions of the invention include, but are not limited to, alpha-1 antitrypsin deficiency, cystic fibrosis, hemochromatosis, lysosomal storage disease, phenylketonuria, Wilson's disease, and Zellweger syndrome.

[0763] Disorders of the reproductive system that are developmentally or hereditary related that may also be diagnosed, treated, and/or prevented with the compositions of the invention include, but are not limited to, androgen insensitivity syndrome, ambiguous genitalia, autosomal sex reversal, congenital adreneal hyperplasia, gonadoblastoma, ovarian germ cell cancer, pseudohermphroditism, true hermaphroditism, undescended testis, XX male syndrome, and XY female type gonadal dysgenesis. The compositions of the invention may also be used to diagnose, treat, and/or prevent developmental or inherited respiratory defects including, but not limited to, askin tumor, azygos lobe, congenital diaphragmatic hernia, congenital lobar emphysema, cystic adenomatoid malformation, lobar emphysema, hyaline membrane disease, and pectus excavatum.

[0764] Developmental or inherited disorders may also result from chromosomal or genetic aberration that may be diagnosed, treated, and/or prevented with the compositions of the invention including, but not limited to, 4p-syndrome, cri du chat syndrome, Digeorge syndrome, Down's syndrome, Edward's syndrome, fragile X syndrome, Klinefelter's syndrome, Patau's syndrome, Prader-Willi syndrome, progeria, Turner's syndrome, triple X syndrome, and XYY syndrome. Other developmental disorders that can be diagnosed, treated, and/or prevented with the compositions of the invention, include, but are not limited to, fetal alcohol syndrome, and can be caused by environmental factors surrounding the developing fetus.

[0765] The compositions of the invention may further be able to be used to diagnose, treat, and/or prevent errors in development or a genetic disposition that may result in hyperproliferative disorders or neoplasms, including, but not limited to, acute childhood lymphoblastic leukemia, askin tumor, Beckwith-Wiedemann syndrome, childhood acute myeloid leukemia, childhood brain stem glioma, childhood cerebellar astrocytoma, childhood extracranial germ cell tumors childhood (primary), gonadoblastoma, hepatocellular cancer, childhood Hodgkin's disease, childhood Hodgkin's lymphoma, childhood hypothalamic and visual pathway glioma, childhood (primary) liver cancer, childhood lymphoblastic leukemia, childhood medulloblastoma, childhood non-Hodgkin's lymphoma, childhood pineal and supratentorial primitive neuroectodermal tumors, childhood primary liver cancer, childhood rhabdomyosarcoma, childhood soft tissue sarcoma, Gorlin syndrome, familial multiple endrocrine neoplasia type 1, neuroblastoma, ovarian germ cell cancer, pheochromocytoma, retinoblastoma, and Wilm's tumor.

[0766] Polypeptides may be administered using any method known in the art, including, but not limited to, direct needle injection at the delivery site, intravenous injection, topical administration, catheter infusion, biolistic injectors, particle accelerators, gelfoam sponge depots, other commercially available depot materials, osmotic pumps, oral or suppositorial solid pharmaceutical formulations, decanting or topical applications during surgery, aerosol delivery. Such methods are known in the art. Polypeptides may be administered as part of a Therapeutic, described in more detail below. Methods of delivering polynucleotides are described in more detail herein.

[0767] Diseases at the Cellular Level

[0768] Diseases associated with increased cell survival or the inhibition of apoptosis that could be treated, prevented, diagnosed and/or prognosed using polynucleotides or polypeptides, as well as antagonists or agonists of the present invention, include cancers (such as follicular lymphomas, carcinomas with p53 mutations, and hormone-dependent tumors, including, but not limited to colon cancer, cardiac tumors, pancreatic cancer, melanoma, retinoblastoma, glioblastoma, lung cancer, intestinal cancer, testicular cancer, stomach cancer, neuroblastoma, myxoma, myoma, lymphoma, endothelioma, osteoblastoma, osteoclastoma, osteosarcoma, chondrosarcoma, adenoma, breast cancer, prostate cancer, Kaposi's sarcoma and ovarian cancer); autoimmune disorders (such as, multiple sclerosis, Sjogren's syndrome, Hashimoto's thyroiditis, biliary cirrhosis, Behcet's disease, Crohn's disease, polymyositis, systemic lupus erythematosus and immune-related glomerulonephritis and rheumatoid arthritis) and viral infections (such as herpes viruses, pox viruses and adenoviruses), inflammation, graft v. host disease, acute graft rejection, and chronic graft rejection.

[0769] In preferred embodiments, polynucleotides, polypeptides, and/or antagonists of the invention are used to inhibit growth, progression, and/or metastasis of cancers, in particular those [listed above] involving Endocrine System tissues.

[0770] Additional diseases or conditions associated with increased cell survival that could be treated or detected by polynucleotides or polypeptides, or agonists or antagonists of the present invention include, but are not limited to, progression, and/or metastases of malignancies and related disorders such as leukemia (including acute leukemias (e.g., acute lymphocytic leukemia, acute myclocytic leukemia (including myeloblastic, promyelocytic, myelomonocytic, monocytic, and erythroleukemia)) and chronic leukemias (e.g., chronic myelocytic (granulocytic) leukemia and chronic lymphocytic leukemia)), polycythemia vera, lymphomas (e.g., Hodgkin's disease and non-Hodgkin's disease), multiple myeloma, Waldenstrom's macroglobulinemia, heavy chain disease, and solid tumors including, but not limited to, sarcomas and carcinomas such as fibrosarcoma, myxosarcoma, liposarcoma, chondrosarcoma, osteogenic sarcoma, chordoma, angiosarcoma, endotheliosarcoma, lymphangiosarcoma, lymphangioendotheliosarcoma, synovioma, mesothelioma, Ewing's tumor, leiomyosarcoma, rhabdomyosarcoma, colon carcinoma, pancreatic cancer, breast cancer, ovarian cancer, prostate cancer, squamous cell carcinoma, basal cell carcinoma, adenocarcinoma, sweat gland carcinoma, sebaceous gland carcinoma, papillary carcinoma, papillary adenocarcinomas, cystadenocarcinoma, medullary carcinoma, bronchogenic carcinoma, renal cell carcinoma, hepatoma, bile duct carcinoma, choriocarcinoma, seminoma, embryonal carcinoma, Wilm's tumor, cervical cancer, testicular tumor, lung carcinoma, small cell lung carcinoma, bladder carcinoma, epithelial carcinoma, glioma, astrocytoma, medulloblastoma, craniopharyngioma, ependymoma, pinealoma, hemangioblastoma, acoustic neuroma, oligodendroglioma, menangioma, melanoma, neuroblastoma, and retinoblastoma.

[0771] Diseases associated with increased apoptosis that could be treated, prevented, diagnosted, and/or prognosed using polynucleotides or polypeptides, as well as agonists or antagonists of the present invention, include, but are not limited to, AIDS; neurodegenerative disorders (such as Alzheimer's disease, Parkinson's disease, Amyotrophic lateral sclerosis, Retinitis pigmentosa, Cerebellar degeneration and brain tumor or prior associated disease); autoimmune disorders (such as, multiple sclerosis, Sjogren's syndrome, Hashimoto's thyroiditis, biliary cirrhosis, Behcet's disease, Crohn's disease, polymyositis, systemic lupus erythematosus and immune-related glomerulonephritis and rheumatoid arthritis) myelodysplastic syndromes (such as aplastic anemia), graft v. host disease, ischemic injury (such as that caused by myocardial infarction, stroke and reperfusion injury), liver injury (e.g., hepatitis related liver injury, ischemia/reperfusion injury, cholestosis (bile duct injury) and liver cancer); toxin-induced liver disease (such as that caused by alcohol), septic shock, cachexia and anorexia.

[0772] Wound Healing and Epithelial Cell Proliferation

[0773] In accordance with yet a further aspect of the present invention, there is provided a process for utilizing polynucleotides or polypeptides, as well as agonists or antagonists of the present invention, for therapeutic purposes, for example, to stimulate epithelial cell proliferation and basal keratinocytes for the purpose of wound healing, and to stimulate hair follicle production and healing of dermal wounds. Polynucleotides or polypeptides, as well as agonists or antagonists of the present invention, may be clinically useful in stimulating wound healing including surgical wounds, excisional wounds, deep wounds involving damage of the dermis and epidermis, eye tissue wounds, dental tissue wounds, oral cavity wounds, diabetic ulcers, dermal ulcers, cubitus ulcers, arterial ulcers, venous stasis ulcers, burns resulting from heat exposure or chemicals, and other abnormal wound healing conditions such as uremia, malnutrition, vitamin deficiencies and complications associated with systemic treatment with steroids, radiation therapy and antineoplastic drugs and antimetabolites. Polynucleotides or polypeptides, as well as agonists or antagonists of the present invention, could be used to promote dermal reestablishment subsequent to dermal loss.

[0774] Polynucleotides or polypeptides, as well as agonists or antagonists of the present invention, could be used to increase the adherence of skin grafts to a wound bed and to stimulate re-epithelialization from the wound bed. The following are types of grafts that polynucleotides or polypeptides, agonists or antagonists of the present invention, could be used to increase adherence to a wound bed: autografts, artificial skin, allografts, autodermic graft, autoepdernic grafts, avacular grafts, Blair-Brown grafts, bone graft, brephoplastic grafts, cutis graft, delayed graft, dermic graft, epidermic graft, fascia graft, full thickness graft, heterologous graft, xenograft, homologous graft, hyperplastic graft, lamellar graft, mesh graft, mucosal graft, Ollier-Thiersch graft, omenpal graft, patch graft, pedicle graft, penetrating graft, split skin graft, thick split graft. Polynucleotides or polypeptides, as well as agonists or antagonists of the present invention, can be used to promote skin strength and to improve the appearance of aged skin.

[0775] It is believed that polynucleotides or polypeptides, as well as agonists or antagonists of the present invention, will also produce changes in hepatocyte proliferation, and epithelial cell proliferation in the lung, breast, pancreas, stomach, small intestine, and large intestine. Polynucleotides or polypeptides, as well as agonists or antagonists of the present invention, could promote proliferation of epithelial cells such as sebocytes, hair follicles, hepatocytes, type II pneumocytes, mucin-producing goblet cells, and other epithelial cells and their progenitors contained within the skin, lung, liver, and gastrointestinal tract. Polynucleotides or polypeptides, agonists or antagonists of the present invention, may promote proliferation of endothelial cells, keratinocytes, and basal keratinocytes.

[0776] Polynucleotides or polypeptides, as well as agonists or antagonists of the present invention, could also be used to reduce the side effects of gut toxicity that result from radiation, chemotherapy treatments or viral infections. Polynucleotides or polypeptides, as well as agonists or antagonists of the present invention, may have a cytoprotective effect on the small intestine mucosa. Polynucleotides or polypeptides, as well as agonists or antagonists of the present invention, may also stimulate healing of mucositis (mouth ulcers) that result from chemotherapy and viral infections.

[0777] Polynucleotides or polypeptides, as well as agonists or antagonists of the present invention, could further be used in full regeneration of skin in full and partial thickness skin defects, including bums, (i.e., repopulation of hair follicles, sweat glands, and sebaceous glands), treatment of other skin defects such as psoriasis. Polynucleotides or polypeptides as well as agonists or antagonists of the present invention, could be used to treat epidermolysis bullosa, a defect in adherence of the epidermis to the underlying dermis which results in frequent, open and painful blisters by accelerating reepithelialization of these lesions. Polynucleotides or polypeptides, as well as agonists or antagonists, of the present invention, could also be used to treat gastric and doudenal ulcers and help heal by scar formation of the mucosal lining and regeneration of glandular mucosa and duodenal mucosal lining more rapidly. Inflammatory bowel diseases, such as Crohn's disease and ulcerative colitis, are diseases, which result in destruction of the mucosal surface of the small or large intestine, respectively. Thus, polynucleotides or polypeptides, as well as agonists or antagonists of the present invention, could be used to promote the resurfacing of the mucosal surface to aid more rapid healing and to prevent progression of inflammatory bowel disease. Treatment with polynucleotides or polypeptides, agonists or antagonists of the present invention, is expected to have a significant effect on the production of mucus throughout the gastrointestinal tract and could be used to protect the intestinal mucosa from injurious substances that are ingested or following surgery. Polynucleotides or polypeptides, as well as agonists or antagonists of the present invention, could be used to treat diseases associate with the under expression.

[0778] Moreover, polynucleotides or polypeptides, as well as agonists or antagonists of the present invention, could be used to prevent and heal damage to the lungs due to various pathological states. Polynucleotides or polypeptides, as well as agonists or antagonists of the present invention, could stimulate proliferation and differentiation and promote the repair of alveoli and brochiolar epithelium to prevent or treat acute or chronic lung damage. For example, emphysema, which results in the progressive loss of aveoli, and inhalation injuries, i.e., resulting, from smoke inhalation and bums, that cause necrosis of the bronchiolar epithelium and alveoli could be effectively treated using polynucleotides or polypeptides, agonists or antagonists of the present invention. Also, polynucleotides or polypeptides, as well as agonists or antagonists of the present invention, could be used to stimulate the proliferation of and differentiation of type II pneumocytes, which may help treat or prevent disease such as hyaline membrane diseases, such as infant respiratory distress syndrome and bronchopulmonary displasia, in premature infants.

[0779] Polynucleotides or polypeptides, as well as agonists or antagonists of the present invention, could stimulate the proliferation and differentiation of hepatocytes and, thus, could be used to alleviate or treat liver diseases and pathologies such as fulminant liver failure caused by cirrhosis, liver damage caused by viral hepatitis and toxic substances (i.e., acetaminophen, carbon tetraholoride and other hepatotoxins known in the art).

[0780] In addition, polynucleotides or polypeptides, as well as agonists or antagonists of the present invention, could be used treat or prevent the onset of diabetes mellitus. In patients with newly diagnosed Types I and II diabetes, where some islet cell function remains, polynucleotides or polypeptides, as well as agonists or antagonists of the present invention, could be used to maintain the islet function so as to alleviate, delay or prevent permanent. manifestation of the disease. Also, polynucleotides or polypeptides, as well as agonists or antagonists of the present invention, could be used as an auxiliary in islet cell transplantation to improve or promote islet cell function.

[0781] Infectious Disease

[0782] Polynucleotides or polypeptides, as well as agonists or antagonists of the present invention can be used to treat or detect infectious agents. For example, by increasing the immune response, particularly increasing the proliferation and differentiation of B and/or T cells, infectious diseases may be treated. The immune response may be increased by either enhancing an existing immune response, or by initiating a new immune response. Alternatively, polynucleotides or polypeptides, as Well as agonists or antagonists of the present invention may also directly inhibit the infectious agent, without necessarily eliciting an immune response.

[0783] Viruses are one example of an infectious agent that can cause disease or symptoms that can be treated or detected by a polynucleotide or polypeptide and/or agonist or antagonist of the present invention. Examples of viruses, include, but are not limited to Examples of viruses, include, but are not limited to the following DNA and RNA viruses and viral families: Arbovirus, Adenoviridae, Arenaviridae, Arterivirus, Bimaviridae, Bunyaviridae, Caliciviridae, Circoviridae, Coronaviridae, Dengue, EBV, HIV, Flaviviridae, Hepadnaviridae (Hepatitis), Herpesviridae (such as, Cytomegalovirus, Herpes Simplex, Herpes Zoster), Mononegavirus (e.g., Paramyxoviridae, Morbillivirus, Rhabdoviridae), Orthomyxoviridae (e.g., Influenza A, Influenza B, and parainfluenza), Papiloma virus, Papovaviridae, Parvoviridae, Picornaviridae, Poxyiridae (such as Smallpox or Vaccinia), Reoviridae (e.g., Rotavirus), Retroviridae (HTLV-I, HTLV-II, Lentivirus), and Togaviridae (e.g., Rubivirus). Viruses falling within these families can cause a variety of diseases or symptoms, including, but not limited to: arthritis, bronchiollitis, respiratory syncytial virus, encephalitis, eye infections (e.g., conjunctivitis, keratitis), chronic fatigue syndrome, hepatitis (A, B, C, E, Chronic Active, Delta), Japanese B encephalitis, Junin, Chikungunya, Rift Valley fever, yellow fever, meningitis, opportunistic infections (e.g., AIDS), pneumonia, Burkitt's Lymphoma, chickenpox, hemorrhagic fever, Measles, Mumps, Parainfluenza, Rabies, the common cold, Polio, leukemia, Rubella, sexually transmitted diseases, skin diseases (e.g., Kaposi's, warts), and viremia. polynucleotides or polypeptides, or agonists or antagonists of the invention, can be used to treat or detect any of these symptoms or diseases. In specific embodiments, polynucleotides, polypeptides, or agonists or antagonists of the invention are used to treat: meningitis, Dengue, EBV, and/or hepatitis (e.g., hepatitis B). In an additional specific embodiment polynucleotides, polypeptides, or agonists or antagonists of the invention are used to treat patients nonresponsive to one or more other commercially available hepatitis vaccines. In a further specific embodiment polynucleotides, polypeptides, or agonists or antagonists of the invention are used to treat AIDS.

[0784] Similarly, bacterial or fungal agents that can cause disease or symptoms and that can be treated or detected by a polynucleotide or polypeptide and/or agonist or antagonist of the present invention include, but not limited to, include, but not limited to, the following Gram-Negative and Gram-positive bacteria and bacterial families and fungi: Actinomycetales (e.g., Corynebacterium, Mycobacterium, Norcardia), Cryptococcus neoformans, Aspergillosis, Bacillaceae (e.g., Anthrax, Clostridium), Bacteroidaceae, Blastomycosis, Bordetella, Borrelia (e.g., Borrelia burgdorferi, Brucellosis, Candidiasis, Campylobacter, Coccidioidomycosis, Cryptococcosis, Dermatocycoses, E. coli (e.g., Enterotoxigenic E. coli and Enterohemorrhagic E. coli), Enterobacteriaceae (Klebsiella, Salmonella (e.g., Salmonella typhi, and Salmonella paratyphi), Serratia, Yersinia), Erysipelothrix, Helicobacter, Legionellosis, Leptospirosis, Listeria, Mycoplasmatales, Mycobacterium leprae, Vibrio cholerae, Neisseriaceae (e.g., Acinetobacter, Gonorrhea, Menigococcal), Meisseria meningitidis, Pasteurellacea Infections (e.g., Actinobacillus, Heamophilus (e.g., Heamophilus influenza type B), Pasteurella), Pseudomonas, Rickettsiaceae, Chlamydiaceae, Syphilis, Shigella spp., Staphylococcal, Meningiococcal, Pneumococcal and Streptococcat (e.g., Streptococcus pneumoniae and Group B Streptococcus). These bacterial or fungal families can cause the following diseases or symptoms, including, but not limited to: bacteremia, endocarditis, eye infections (conjunctivitis, tuberculosis, uveitis), gingivitis, opportunistic infections (e.g., AIDS related infections), paronychia, prosthesis-related infections, Reiter's Disease, respiratory tract infections, such as Whooping Cough or Empyema, sepsis, Lyme Disease, Cat-Scratch Disease, Dysentery, Paratyphoid Fever, food poisoning, Typhoid, pneumonia, Gonorrhea, meningitis (e.g., mengitis types A and B), Chlamydia, Syphilis, Diphtheria, Leprosy, Paratuberculosis, Tuberculosis, Lupus, Botulism, gangrene, tetanus, impetigo, Rheumatic Fever, Scarlet Fever, sexually transmitted diseases, skin diseases (e.g., cellulitis, dermatocycoses), toxemia, urinary tract infections, wound infections. Polynucleotides or polypeptides, agonists or antagonists of the invention, can be used to treat or detect any of these symptoms or diseases. In specific embodiments, Polynucleotides, polypeptides, agonists or antagonists of the invention are used to treat: tetanus, Diptheria, botulism, and/or meningitis type B.

[0785] Moreover, parasitic agents causing disease or symptoms that can be treated or detected by a polynucleotide or polypeptide and/or agonist or antagonist of the present invention include, but not limited to, the following families or class: Amebiasis, Babesiosis, Coccidiosis, Cryptosporidiosis, Dientamoebiasis, Dourine, Ectoparasitic, Giardiasis, Helminthiasis, Leishmaniasis, Theileriasis, Toxoplasmosis, Trypanosomiasis, and Trichomonas and Sporozoans (e.g., Plasmodium virax, Plasmodium falciparium, Plasmodium malariae and Plasmodium ovale). These parasites can cause a variety of diseases or symptoms, including, but not limited to: Scabies, Trombiculiasis, eye infections, intestinal disease (e.g., dysentery, giardiasis), liver disease, lung disease, opportunistic infections (e.g., A/DS related), malaria, pregnancy complications, and toxoplasmosis. polynucleotides or polypeptides, or agonists or antagonists of the invention, can be used to treat or detect any of these symptoms or diseases.

[0786] Polynucleotides or polypeptides, as well as agonists or antagonists of the present invention of the present invention could either be by administering an effective amount of a polypeptide to the patient, or by removing cells from the patient, supplying the cells with a polynucleotide of the present invention, and returning the engineered cells to the patient (ex vivo therapy). Moreover, the polypeptide or polynucleotide of the present invention can be used as an antigen in a vaccine to raise an immune response against infectious disease.

[0787] Regeneration

[0788] Polynucleotides or polypeptides, as well as agonists or antagonists of the present invention can be used to differentiate, proliferate, and attract cells, leading to the regeneration of tissues. (See, Science 276:59-87 (1997).) The regeneration of tissues could be used to repair, replace, or protect tissue damaged by congenital defects, trauma (wounds, burns, incisions, or ulcers), age, disease (e.g. osteoporosis, osteocarthritis, periodontal disease, liver failure), surgery, including cosmetic plastic surgery, fibrosis, reperfusion injury, or systemic cytokine damage.

[0789] Tissues that could be regenerated using the present invention include organs (e.g., pancreas, liver, intestine, kidney, skin, endothelium), muscle (smooth, skeletal or cardiac), vasculature (including vascular and lymphatics), nervous, hematopoietic, and skeletal (bone, cartilage, tendon, and ligament) tissue. Preferably, regeneration occurs without or decreased scarring. Regeneration also may include angiogenesis.

[0790] Moreover, polynucleotides or polypeptides, as well as agonists or antagonists of the present invention, may increase regeneration of tissues difficult to heal. For example, increased tendon/ligament regeneration would quicken recovery time after damage. Polynucleotides or polypeptides, as well as agonists or antagonists of the present invention could also be used prophylactically in an effort to avoid damage. Specific diseases that could be treated include of tendinitis, carpal tunnel syndrome, and other tendon or ligament defects. A further example of tissue regeneration of non-healing wounds includes pressure ulcers, ulcers associated with vascular insufficiency, surgical, and traumatic wounds.

[0791] Similarly, nerve and brain tissue could also be regenerated by using polynucleotides or polypeptides, as well as agonists or antagonists of the present invention, to proliferate and differentiate nerve cells. Diseases that could be treated using this method include central and peripheral nervous system diseases, neuropathies, or mechanical and traumatic disorders (e.g., spinal cord disorders, head trauma, cerebrovascular disease, and stoke). Specifically, diseases associated with peripheral nerve injuries, peripheral neuropathy (e.g., resulting from chemotherapy or other medical therapies), localized neuropathies, and central nervous system diseases (e.g., Alzheimer's disease, Parkinson's disease, Huntington's disease, amyotrophic lateral sclerosis, and Shy-Drager syndrome), could all be treated using the polynucleotides or polypeptides, as well as agonists or antagonists of the present invention.

[0792] Chemotaxis

[0793] Polynucleotides or polypeptides, as well as agonists or antagonists of the present invention may have chemotaxis activity. A chemotaxic molecule attracts or mobilizes cells (e.g., monocytes, fibroblasts, neutrophils, T-cells, mast cells, eosinophils, epithelial and/or endothelial cells) to a particular site in the body, such as inflammation, infection, or site of hyperproliferation. The mobilized cells can then fight off and/or heal the particular trauma or abnormality.

[0794] Polynucleotides or polypeptides, as well as agonists or antagonists of the present invention may increase chemotaxic activity of particular cells. These chemotactic molecules can then be used to treat inflammation, infection, hyperproliferative disorders, or any immune system disorder by increasing the number of cells targeted to a particular location in the body. For example, chemotaxic molecules can be used to treat wounds and other trauma to tissues by attracting immune cells to the injured location. Chemotactic molecules of the present invention can also attract fibroblasts, which can be used to treat wounds.

[0795] It is also contemplated that polynucleotides or polypeptides, as well as agonists or antagonists of the present invention may inhibit chemotactic activity. These molecules could also be used to treat disorders. Thus, polynucleotides or polypeptides, as well as agonists or antagonists of the present invention could be used as an inhibitor of chemotaxis.

[0796] Binding Activity

[0797] A polypeptide of the present invention may be used to screen for molecules that bind to the polypeptide or for molecules to which the polypeptide binds. The binding of the polypeptide and the molecule may activate (agonist), increase, inhibit (antagonist), or decrease activity of the polypeptide or the molecule bound. Examples of such molecules include antibodies, oligonucleotides, proteins (e.g., receptors), or small molecules.

[0798] Preferably, the molecule is closely related to the natural ligand of the polypeptide, e.g., a fragment of the ligand, or a natural substrate, a ligand, a structural or functional mimetic. (See, Coligan et al., Current Protocols in Immunology 1(2):Chapter 5 (1991).) Similarly, the molecule can be closely related to the natural receptor to which the polypeptide binds, or at least, a fragment of the receptor capable of being bound by the polypeptide (e.g., active site). In either case, the molecule can be rationally designed using known techniques.

[0799] Preferably, the screening for these molecules involves producing appropriate cells which express the polypeptide. Preferred cells include cells from mammals, yeast, Drosophila, or E. coli. Cells expressing the polypeptide (or cell membrane containing the expressed polypeptide) are then preferably contacted with a test compound potentially containing the molecule to observe binding, stimulation, or inhibition of activity of either the-polypeptide or the molecule.

[0800] The assay may simply test binding of a candidate compound to the polypeptide, wherein binding is detected by a label, or in an assay involving competition with a labeled competitor. Further, the assay may test whether the candidate compound results in a signal generated by binding to the polypeptide.

[0801] Alternatively, the assay can be carried out using cell-free preparations, polypeptide/molecule affixed to a solid support, chemical libraries, or natural product mixtures. The assay may also simply comprise the steps of mixing a candidate compound with a solution containing a polypeptide, measuring polypeptide/molecule activity or binding, and comparing the polypeptide/molecule activity or binding to a standard.

[0802] Preferably, an ELISA assay can measure polypeptide level or activity in a sample (e.g., biological sample) using a monoclonal or polyclonal antibody. The antibody can measure polypeptide-level or activity by either binding, directly or indirectly, to the polypeptide or by competing with the polypeptide for a substrate.

[0803] Additionally, the receptor to which the polypeptide of the present invention binds can be identified by numerous methods known to those of skill in the art, for example, ligand panning and FACS sorting (Coligan, et al., Current Protocols in Immun., 1(2), Chapter 5, (1991)). For example, expression cloning is employed wherein polyadenylated RNA is prepared from a cell responsive to the polypeptides, for example, NIH3T3 cells which are known to contain multiple receptors for the FGF family proteins, and SC-3 cells, and a cDNA library created from this RNA is divided into pools and used to transfect COS cells or other cells that are not responsive to the polypeptides. Transfected cells which are grown on glass slides are exposed to the polypeptide of the present invention, after they have been labeled. The polypeptides can be labeled by a variety of means including iodination or inclusion of a recognition site for a site-specific protein kinase.

[0804] Following fixation and incubation, the slides are subjected to auto-radiographic analysis. Positive pools are identified and sub-pools are prepared and re-transfected using an iterative sub-pooling and re-screening process, eventually yielding a single clones that encodes the putative receptor.

[0805] As an alternative approach for. receptor identification, the labeled polypeptides can be photoaffinity linked with cell membrane or extract preparations that express the receptor molecule. Cross-linked material is resolved by PAGE analysis and exposed to X-ray film. The labeled complex containing the receptors of the polypeptides can be excised, resolved into peptide fragments, and subjected to protein microsequencing. The amino acid sequence obtained from microsequencing would be used to design a set of degenerate oligonucleotide probes to screen a cDNA library to identify the genes encoding the putative receptors.

[0806] Moreover, the techniques of gene-shuffling, motif-shuffling, exon-shuffling, and/or codon-shuffling (collectively referred to as “DNA shuffling”) may be employed to modulate the activities of the polypeptide of the present invention thereby effectively generating agonists- and antagonists of the polypeptide of the present invention. See generally, U.S. Pat. Nos. 5,605,793, 5,811,238, 5,830,721, 5,834,252, and 5,837,458, and Patten, P. A., et al., Curr. Opinion Biotechnol. 8:724-33 (1997); Harayama, S. Trends Biotechnol. 16(2):76-82 (1998); Hansson L. O., et al., J. Mol. Biol. 287:265-76 (1999); and Lorenzo, M. M. and Blasco, R. Biotechniques 24(2):308-13 (1998); each of these patents and publications are hereby incorporated by reference). In one embodiment, alteration of polynucleotides and corresponding polypeptides may be achieved by DNA shuffling. DNA shuffling involves the assembly of two or more DNA segments into a desired molecule by homologous, or site-specific, recombination. In another embodiment, polynucleotides and corresponding polypeptides may be altered by being subjected to random mutagenesis by error-prone PCR, random nucleotide insertion or other methods prior to recombination. In another embodiment, one or more components, motifs, sections, parts, domains, fragments, etc., of the polypeptide of the present invention may be recombined with one or more components, motifs, sections, parts, domains, fragments, etc. of one or more heterologous molecules. In preferred embodiments, the heterologous molecules are family members. In further preferred embodiments, the heterologous molecule is a growth factor such as, for example, platelet-derived growth factor (PDGF), insulin-like growth factor (IGF-I), transforming growth factor (TGF)-alpha, epidermal growth factor (EGF), fibroblast growth factor (FGF), TGF-beta, bone morphogenetic protein (BMP)-2, BMP-4, BMP-5, BMP-6, BMP-7, activins A and B, decapentaplegic(dpp), 60A, OP-2, dorsalin, growth differentiation factors (GDFs), nodal, MIS, inhibin-alpha, TGF-beta1, TGF-beta2, TGF-beta3, TGF-beta5, and glial-derived neurotrophic factor (GDNF).

[0807] Other preferred fragments are biologically active fragments of the polypeptide of the present invention. Biologically active fragments are those exhibiting activity similar, but not necessarily identical, to an activity of the polypeptide of the present invention. The biological activity of the fragments may include an improved desired activity, or a decreased undesirable activity.

[0808] Additionally, this invention provides a method of screening compounds to identify those which modulate the action of the polypeptide of the present invention. An example of such an assay comprises combining a mammalian fibroblast cell, a the polypeptide of the present invention, the compound to be screened and 3[H] thymidine under cell culture conditions where the fibroblast cell would normally proliferate. A control assay may be performed in the absence of the compound to be screened and compared to the amount of fibroblast proliferation in the presence of the compound to determine if the compound stimulates proliferation by determining the uptake of ³[H] thymidine in each case. The amount of fibroblast cell proliferation is measured by liquid scintillation chromatography which measures the incorporation of ³[H] thymidine. Both agonist and antagonist compounds may be identified by this procedure.

[0809] In another method, a mammalian cell or membrane preparation expressing a receptor for a polypeptide of the present invention is incubated with a labeled polypeptide of the present invention in the presence of the compound. The ability of the compound to enhance or block this interaction could then be measured. Alternatively, the response of a known second messenger system following interaction of a compound to be screened and the receptor is measured and the ability of the compound to bind to the receptor and elicit a second messenger response is measured to determine if the compound is a potential agonist or antagonist. Such second messenger systems include but are not limited to, cAMP guanylate cyclase, ion channels or phosphoinositide hydrolysis.

[0810] All of these above assays can be used as diagnostic or prognostic markers. The molecules discovered using these assays can be used to treat disease or to bring about a particular result in a patient (e.g., blood vessel growth) by activating or inhibiting the polypeptide/molecule. Moreover, the assays can discover agents which may inhibit or enhance the production of the polypeptides of the invention from suitably manipulated cells or tissues.

[0811] Therefore, the invention includes a method of identifying compounds which bind to a polypeptide of the invention comprising the steps of (a) incubating a candidate binding compound with a polypeptide of the present invention; and (b) determining if binding has occurred. Moreover, the invention includes a method of identifying agonists/antagonists comprising the steps of: (a) incubating a candidate compound with a polypeptide of the present invention, (b) assaying a biological activity, and (b) determining if a biological activity of the polypeptide has been altered.

[0812] Targeted Delivery

[0813] In another embodiment, the invention provides a method of delivering compositions to targeted cells expressing a receptor for a polypeptide of the invention, or cells expressing a cell bound form of a polypeptide of the invention.

[0814] As discussed herein, polypeptides or antibodies of the invention may be associated with heterologous polypeptides, heterologous nucleic acids, toxins, or prorugs via hydrophobic, hydrophilic, ionic and/or covalent interactions. In one embodiment, the invention provides a method for the specific delivery of compositions of the invention to cells by administering polypeptides of the invention (including antibodies) that are associated with heterologous polypeptides or nucleic acids. In one example, the invention provides a method for delivering a therapeutic protein into the targeted cell. In another example, the invention provides a method for delivering a single stranded nucleic acid (e.g., antisense or ribozymes) or double stranded nucleic acid (e.g., DNA that can integrate into the cell's genome or replicate episomally and that can be transcribed) into the targeted cell.

[0815] In another embodiment, the invention provides a method for the specific destruction of cells (e.g., the destruction of tumor cells) by administering polypeptides of the invention (e.g., polypeptides of the invention or antibodies of the invention) in association with toxins or cytotoxic prodrugs.

[0816] By “toxin” is meant compounds that bind and activate endogenous cytotoxic effector systems, radioisotopes, holotoxins, modified toxins, catalytic subunits of toxins, or any molecules or enzymes not normally present in or on the surface of a cell that under defined conditions cause the cell's death. Toxins that may be used according to the methods of the invention include, but are not limited to, radioisotopes known in the art, compounds such as, for example, antibodies (or complement fixing containing portions thereof) that bind an inherent or induced endogenous cytotoxic effector system, thymidine kinase, endonuclease, RNAse, alpha toxin, ricin, abrin, Pseudomonas exotoxin A, diphtheria toxin, saporin, momordin, gelonin, pokeweed antiviral protein, alpha-sarcin and cholera toxin. By “cytotoxic prodrug” is meant a non-toxic compound that is converted by an enzyme, normally present in the cell, into a cytotoxic compound. Cytotoxic prodrugs that may be used according to the methods of the invention include, but are not limited to; glutamyl derivatives of benzoic acid mustard alkylating agent, phosphate derivatives of etoposide or mitomycin C, cytosine arabinoside, daunorubisin, and phenoxyacetamide derivatives of doxorubicin.

[0817] Drug Screening

[0818] Further contemplated is the use of the polypeptides of the present invention, or the polynucleotides encoding these polypeptides, to screen for molecules which modify the activities of the polypeptides of the present invention. Such a method would include contacting the polypeptide of the present invention with a selected compound(s) suspected of having antagonist or agonist activity, and assaying the activity of these polypeptides following binding.

[0819] This invention is particularly useful for screening therapeutic compounds by using the polypeptides of the present invention, or binding fragments thereof, in any of a variety of drug screening techniques. The polypeptide or fragment employed in such a test may be affixed to a solid support, expressed on a cell surface, free in solution, or located intracellularly. One method of drug screening utilizes eukaryotic or prokaryotic host cells which are stably transformed with recombinant nucleic acids expressing the polypeptide or fragment. Drugs are screened against such transformed cells in competitive binding assays. One may measure, for example, the formulation of complexes between the agent being tested and a polypeptide of the present invention.

[0820] Thus, the present invention provides methods of screening for drugs or any other agents which affect activities mediated by the polypeptides of the present invention. These methods comprise contacting such an agent with a polypeptide of the present invention or a fragment thereof and assaying for the presence of a complex between the agent and the polypeptide or a fragment thereof, by methods well known in the art. In such a competitive binding assay, the agents to screen are typically labeled. Following incubation, free agent is separated from that present in bound form, and the amount of free or uncomplexed label is a measure of the ability of a particular agent to bind to the polypeptides of the present invention.

[0821] Another technique for drug screening provides high throughput screening for compounds having suitable binding affinity to the polypeptides of the present invention, and is described in great detail in European Patent Application 84/03564, published on Sep. 13, 1984, which is incorporated herein by reference herein. Briefly stated, large numbers of different small peptide test compounds are synthesized on a solid substrate, such as plastic pins or some other surface. The peptide test compounds are reacted with polypeptides of the present invention and washed. Bound polypeptides are then detected by methods well known in the art. Purified polypeptides are coated directly onto plates for use in the aforementioned drug screening techniques. In addition, non-neutralizing antibodies may be used to capture the peptide and immobilize it on the solid support.

[0822] This invention also contemplates the use of competitive drug screening assays in which neutralizing antibodies capable of binding polypeptides of the present invention specifically compete with a test compound for binding to the polypeptides or fragments thereof. In this manner, the antibodies are used to detect the presence of any peptide which shares one or more antigenic epitopes with a polypeptide of the invention.

[0823] Antisense and Ribozyme (Antagonists)

[0824] In specific embodiments, antagonists according to the present invention are nucleic acids corresponding to the sequences contained in SEQ ID NO:X, or the complementary strand thereof, and/or to cDNA sequences contained in cDNA Clone ID NO:Z identified for example, in Table 1A. In one embodiment, antisense sequence is generated internally, by the organism, in another embodiment, the antisense sequence is separately administered (see, for example, O'Connor, J., Neurochem. 56:560 (1991). Oligodeoxynucleotides as Antisense Inhibitors of Gene Expression, CRC Press, Boca Raton, Fla. (1988). Antisense technology can be used to control gene expression through antisense DNA or RNA, or through triple-helix formation. Antisense techniques are discussed for example, in Okano, J., Neurochem. 56:560 (1991); Oligodeoxynucleotides as Antisense Inhibitors of Gene Expression, CRC Press, Boca Raton, Fla. (1988). Triple helix formation is discussed in, for instance, Lee et al., Nucleic Acids Research 6:3073 (1979); Cooney et al., Science 241:456 (1988); and Dervan et al., Science 251:1300 (1991). The methods are based on binding of a polynucleotide to a complementary DNA or RNA.

[0825] For example, the use of c-myc and c-myb antisense RNA constructs to inhibit the growth of the non-lymphocytic leukemia cell line HL-60 and other cell lines was previously described. (Wickstrom et al. (1988); Anfossi et al. (1989)). These experiments were performed in vitro by incubating cells with the oligoribonucleotide. A similar procedure for in vivo use is described in WO 91/15580. Briefly, a pair of oligonucleotides for a given antisense RNA is produced as follows: A sequence complimentary to the first 15 bases of the open reading frame is flanked by an EcoR1 site on the 5′ end and a HindIII site on the 3′ end. Next, the pair of oligonucleotides is heated at 90° C. for one minute and then annealed in 2×ligation buffer (20 mM TRIS HCl pH 7.5, 10 mM MgCl2, 10 MM dithiothreitol (DTT) and 0.2 mM ATP) and then ligated to the EcoR1/Hind III site of the retroviral vector PMV7 (WO 91/15580).

[0826] For example, the 5′ coding portion of a polynucleotide that encodes the polypeptide of the present invention may be used to design an antisense RNA oligonucleotide of from about 10 to 40 base pairs in length. A DNA oligonucleotide is designed to be complementary to a region of the gene involved in transcription thereby preventing transcription and the production of the receptor. The antisense RNA oligonucleotide hybridizes to the mRNA in vivo and blocks translation of the mRNA molecule into receptor polypeptide.

[0827] In one embodiment, the antisense nucleic acid of the invention is produced intracellularly by transcription from an exogenous sequence. For example, a vector or a portion thereof, is transcribed, producing an antisense nucleic acid, (RNA) of the invention. Such a vector would contain a sequence encoding the antisense nucleic acid. Such a vector can remain episomal or become chromosomally integrated, as long as it can be transcribed to produce the desired antisense RNA. Such vectors can be constructed by recombinant DNA technology methods standard in the art. Vectors can be plasmid, viral, or others known in the art, used for replication and expression in vertebrate cells. Expression of the sequence encoding the polypeptide of the present invention or fragments thereof, can be by any promoter known in the art to act in vertebrate, preferably human cells. Such promoters can be inducible or constitutive. Such promoters include, but are not limited to, the SV40 early promoter region (Bernoist and Chambon, Nature 29:304-310 (1981), the promoter contained in the 3′ long terminal repeat of Rous sarcoma virus (Yamamoto et al., Cell 22:787-797 (1980), the herpes thymidine promoter (Wagner et al., Proc. Natl. Acad. Sci. U.S.A. 78:1441-1445 (1981), the regulatory sequences of the metallothionein gene (Brinster, et al., Nature 296:39-42 (1982)), etc.

[0828] The antisense nucleic acids of the invention comprise a sequence complementary to at least a portion of an RNA transcript of a gene of the present invention. However, absolute complementarity, although preferred, is not required. A sequence “complementary to at least a portion of an RNA,” referred to herein, means a sequence having sufficient complementarity to be able to hybridize with the RNA, forming a stable duplex; in the case of double stranded antisense nucleic acids, a single strand of the duplex DNA may thus be tested, or triplex formation may be assayed. The ability to hybridize will depend on both the degree of complementarity and the length of the antisense nucleic acid. Generally, the larger the hybridizing nucleic acid, the more base mismatches with a RNA it may contain and still form a stable duplex (or triplex as the case may be). One skilled in the art can ascertain a tolerable degree of mismatch by use of standard procedures to determine the melting point of the hybridized complex.

[0829] Oligonucleotides that are complementary to the 5′ end of the message, e.g., the 5′ untranslated sequence up to and including the AUG initiation codon, should work most efficiently at inhibiting translation. However, sequences complementary to the 3′ untranslated sequences of mRNAs have been shown to be effective at inhibiting translation of mRNAs as well. See generally, Wagner, R., 1994, Nature 372:333-335. Thus, oligonucleotides complementary to either the 5′- or 3′-non-translated, non-coding regions of polynucleotide sequences described herein could be used in an antisense approach to inhibit translation of endogenous mRNA. Oligonucleotides complementary to the 5′ untranslated region of the mRNA should include the complement of the AUG start codon. Antisense oligonucleotides complementary to mRNA coding regions are less efficient inhibitors of translation but could be used in accordance with the invention. Whether designed to hybridize to the 5′-, 3′- or coding region of mRNA of the present invention, antisense nucleic acids should be at least six nucleotides in length, and are preferably oligonucleotides ranging from 6 to about 50 nucleotides in length. In specific aspects the oligonucleotide is at least 10 nucleotides, at least 17 nucleotides, at least 25 nucleotides or at least 50 nucleotides.

[0830] The polynucleotides of the invention can be DNA or RNA or chimeric mixtures or derivatives or modified versions thereof, single-stranded or double-stranded. The oligonucleotide can be modified at the base moiety, sugar moiety, or phosphate backbone, for example, to improve stability of the molecule, hybridization, etc. The oligonucleotide may include other appended groups such as peptides (e.g., for targeting host cell receptors in vivo), or agents facilitating transport across the cell membrane (see, e.g., Letsinger et al., 1989, Proc. Natl. Acad. Sci. U.S.A. 86:6553-6556; Lemaitre et al., 1987, Proc. Natl. Acad. Sci. 84:648-652; PCT Publication No. WO88/09810, published Dec. 15, 1988) or the blood-brain barrier (see, e.g., PCT Publication No. WO89/10134, published Apr. 25, 1988), hybridization-triggered cleavage agents. (See, e.g., Krol et al., 1988, BioTechniques 6:958-976) or intercalating agents. (See, e.g., Zon, 1988, Pharm. Res. 5:539-549). To this end, the oligonucleotide may be conjugated to another molecule, e.g., a peptide, hybridization triggered cross-linking agent, transport agent, hybridization-triggered cleavage agent, etc.

[0831] The antisense oligonucleotide may comprise at least one modified base moiety which is selected from the group including, but not limited to, 5-fluorouracil, 5-bromouracil, 5-chlorouracil, 5-iodouracil, hypoxanthine, xantine, 4-acetylcytosine, 5-(carboxyhydroxylmethyl) uracil, 5-carboxymethylaminomethyl-2-thiouridine, 5-carboxymethylaminomethyluracil, dihydrouracil, beta-D-galactosylqueosine, inosine, N6-isopentenyladenine, 1-methylguanine, 1-methylinosine, 2,2-dimethylguanine, 2-methyladenine, 2-methylguanine, 3-methylcytosine, 5-methylcytosine, N6-adenine, 7-methylguanine, 5-methylaminomethyluracil, 5-methoxyaminomethyl-2-thiouracil, beta-D-mannosylqueosine, 5′-methoxycarboxymethyluracil, 5-methoxyuracil, 2-methylthio-N-6-isopentenyladenine, uracil-5-oxyacetic acid (v), wybutoxosine, pseudouracil, queosine, 2-thiocytosine, 5-methyl-2-thiouracil, 2-thiouracil, 4-thiouracil, 5-methyluracil, uracil-5-oxyacetic acid methylester, uracil-5-oxyacetic acid (v), 5-methyl-2-thiouracil, 3-(3-amino-3-N-2-carboxypropyl) uracil, (acp3)w, and 2,6-diaminopurine.

[0832] The antisense oligonucleotide may also comprise at least one modified sugar moiety selected from the group including, but not limited to, arabinose, 2-fluoroarabinose, xylulose, and hexose.

[0833] In yet another embodiment, the antisense oligonucleotide comprises at least one modified phosphate backbone selected from the group including, but not limited to, a phosphorothioate, a phosphorodithioate, a phosphoramidothioate, a phosphoramidate, a phosphordiamidate, a methylphosphonate, an alkyl phosphotriester, and a formacetal or analog thereof.

[0834] In yet another embodiment, the antisense oligonucleotide is an a-anomeric oligonucleotide. An a-anomeric oligonucleotide forms specific double-stranded hybrids with complementary RNA in which, contrary to the usual b-units, the strands run parallel to each other (Gautier et al., 1987, Nucl. Acids Res. 15:6625-6641). The oligonucleotide is a 2′-O-methylribonucleotide (Inoue et al., 1987, Nucl. Acids Res. 15:6131-6148), or a chimeric RNA-DNA analogue (Inoue et al., 1987, FEBS Lett. 215:327-330).

[0835] Polynucleotides of the invention may be synthesized by standard methods known in the art, e.g. by use of an automated DNA synthesizer (such as are commercially available from Biosearch, Applied Biosystems, etc.). As examples, phosphorothioate oligonucleotides may be synthesized by the method of Stein et al. (1988, Nucl. Acids Res. 16:3209), methylphosphonate oligonucleotides can be prepared by use of controlled pore glass polymer supports (Sarin et al., 1988, Proc. Natl. Acad. Sci. U.S.A. 85:7448-7451), etc.

[0836] While antisense nucleotides complementary to the coding region sequence could be used, those complementary to the transcribed untranslated region are most preferred.

[0837] Potential antagonists according to the invention also include catalytic RNA, or a ribozyme (See, e.g., PCT International Publication WO 90/11364, published Oct. 4, 1990; Sarver et at, Science 247:1222-1225 (1990). While ribozymes that cleave mRNA at site specific recognition sequences can be used to destroy mRNAs, the use of hammerhead ribozymes is preferred. Hammerhead ribozymes cleave mRNAs at locations dictated by flanking regions that form complementary base pairs with the target mRNA. The sole requirement is that the target mRNA have the following sequence of two bases: 5′-UG-3′. The construction and production of hammerhead ribozymes is well known in the art and is described more fully in Haseloff and Gerlach, Nature 334:585-591 (1988). There are numerous potential hammerhead ribozyme cleavage sites within the nucleotide sequence of SEQ ID NO:X. Preferably, the ribozyme is engineered so that the cleavage recognition site is located near the 5′ end of the mRNA; i.e., to increase efficiency and minimize the intracellular accumulation of non-functional mRNA transcripts.

[0838] As in the antisense approach, the ribozymes of the invention can be composed of modified oligonucleotides (e.g. for improved stability, targeting, etc.) and should be delivered to cells which express in vivo. DNA constructs encoding the ribozyme may be introduced into the cell in the same manner as described above for the introduction of antisense encoding DNA. A preferred method of delivery involves using a DNA construct “encoding” the ribozyme under the control of a strong constitutive promoter, such as, for example, pol III or pol II promoter, so that transfected cells will produce sufficient quantities of the ribozyme to destroy endogenous messages and inhibit translation. Since ribozymes unlike antisense molecules, are catalytic, a lower intracellular concentration is required for efficiency.

[0839] Antagonist/agonist compounds may be employed to inhibit the cell growth and proliferation effects of the polypeptides of the present invention on neoplastic cells and tissues, i.e. stimulation of angiogenesis of tumors, and, therefore, retard or prevent abnormal cellular growth and proliferation, for example, in tumor formation or growth.

[0840] The antagonist/agonist may also be employed to prevent hyper-vascular diseases, and prevent the proliferation of epithelial lens cells after extracapsular cataract surgery. Prevention of the mitogenic activity of the polypeptides of the present invention may also be desirous in cases such as restenosis after balloon angioplasty.

[0841] The antagonist/agonist may also be employed to prevent the growth of scar tissue during wound healing.

[0842] The antagonist/agonist may also be employed to treat the diseases described herein.

[0843] Thus, the invention provides a method of treating disorders or diseases, including but not limited to the disorders or diseases listed throughout this application, associated with overexpression of a polynucleotide of the present invention by administering to a patient (a) an antisense molecule directed to the polynucleotide of the present invention, and/or (b) a ribozyme directed to the polynucleotide of the present invention.

[0844] Binding Peptides and Other Molecules

[0845] The invention also encompasses screening methods for identifying polypeptides and nonpolypeptides that bind endocrine antigen polypeptides, and the endocrine antigen binding molecules identified thereby. These binding molecules are useful, for example, as agonists and antagonists of the endocrine antigen polypeptides. Such agonists and antagonists can be used, in accordance with the invention, in the therapeutic embodiments described in detail, below.

[0846] This method comprises the steps of:

[0847] contacting endocrine antigen polypeptides or endocrine antigen-like polypeptides with a plurality of molecules; and

[0848] identifying a molecule that binds the endocrine antigen polypeptides or endocrine antigen-like polypeptides.

[0849] The step of contacting the endocrine antigen polypeptides or endocrine antigen-like polypeptides with the plurality of molecules may be effected in a number of ways. For example, one may contemplate immobilizing the endocrine antigen polypeptides or endocrine antigen-like polypeptides on a solid support and bringing a solution of the plurality of molecules in contact with the immobilized endocrine antigen polypeptides or endocrine antigen-like polypeptides. Such a procedure would be akin to an affinity chromatographic process, with. the affinity matrix being comprised of the immobilized endocrine antigen polypeptides or endocrine antigen-like polypeptides. The molecules having a selective affinity for the endocrine antigen polypeptides or endocrine antigen-like polypeptides can then be purified by affinity selection. The nature of the solid support, process for attachment of the endocrine antigen polypeptides or endocrine antigen-like polypeptides to the solid support, solvent, and conditions of the affinity isolation or selection are largely conventional and well known to those of ordinary skill in the art.

[0850] Alternatively, one may also separate a plurality of polypeptides into substantially separate fractions comprising a subset of or individual polypeptides. For instance, one can separate the plurality of polypeptides by gel electrophoresis, column chromatography, or like method known to those of ordinary skill for the separation of polypeptides. The individual polypeptides can also be produced by a transformed host cell in such a way as to be expressed on or about its outer surface (e.g., a recombinant phage). Individual isolates can then be “probed” by the endocrine antigen polypeptides or endocrine antigen-like polypeptides, optionally in the presence of an inducer should one be required for expression, to determine if any selective affinity interaction takes place between the endocrine antigen polypeptides or endocrine antigen-like polypeptides and the individual clone. Prior to contacting the endocrine antigen polypeptides or endocrine antigen-like polypeptides with each fraction comprising individual polypeptides, the polypeptides could first be transferred to a solid support for additional convenience. Such a solid support may simply be a piece of filter membrane, such as one made of nitrocellulose or nylon. In this manner, positive clones could be identified from a collection of transformed host cells of an expression library, which harbor a DNA construct encoding a polypeptide having a selective affinity for endocrine antigen polypeptides or endocrine antigen-like polypeptides. Furthermore, the amino acid sequence of the polypeptide having a selective affinity for the endocrine antigen polypeptides or endocrine antigen-like polypeptides can be determined directly by conventional means or the coding sequence of the DNA encoding the polypeptide can frequently be determined more conveniently. The primary sequence can then be deduced from the corresponding DNA sequence. If the amino acid sequence is to be determined from the polypeptide itself, one may use microsequencing techniques. The sequencing technique may include mass spectroscopy.

[0851] In certain situations, it may be desirable to wash away any unbound endocrine antigen polypeptides or endocrine antigen-like polypeptides, or alternatively, unbound polypeptides, from a mixture of the endocrine antigen polypeptides or endocrine antigen-like polypeptides and the plurality of polypeptides prior to attempting to determine or to detect the presence of a selective affinity interaction. Such a wash step may be particularly desirable when the endocrine antigen polypeptides or endocrine antigen-like polypeptides or the plurality of polypeptides is bound to a solid support.

[0852] The plurality of molecules provided according to this method may be provided by way of diversity libraries, such as random or combinatorial peptide or nonpeptide libraries which can be screened for molecules that specifically bind endocrine antigen polypeptides. Many libraries are known in the art that can be used, e.g., chemically synthesized libraries, recombinant (e.g., phage display libraries), and in vitro translation-based libraries. Examples of chemically synthesized libraries are described in Fodor et al., 1991, Science 251:767-773; Houghten et al., 1991, Nature 354:84-86; Lam et al., 1991, Nature 354:82-84; Medynski, 1994, Bio/Technology 12:709-710; Gallop et al., 1994, J. Medicinal Chemistry 37(9):1233-1251; Ohlmeyer et al., 1993, Proc. Natl. Acad. Sci. USA 90:10922-10926; Erb et al., 1994, Proc. Natl. Acad. Sci. USA 91:11422-11426; Houghten et al., 1992, Biotechniques 13:412; Jayawickreme et al., 1994, Proc. Natl. Acad. Sci. USA 91:1614-1618; Salmon et al., 1993, Proc. Natl. Acad. Sci. USA 90:11708-11712; PCT Publication No. WO 93/20242; and Brenner and Lerner, 1992, Proc. Natl. Acad. Sci. USA 89:5381-5383.

[0853] Examples of phage display libraries are described in Scott and Smith, 1990, Science 249:386-390; Devlin et al., 1990, Science, 249:404-406; Christian, R. B., et al., 1992, J. Mol. Biol. 227:711-718); Lenstra, 1992, J. Immunol. Meth. 152:149-157; Kay et al., 1993, Gene 128:59-65; and PCT Publication No. WO 94/18318 dated Aug. 18, 1994.

[0854] In vitro translation-based libraries include but are not limited to those described in PCT Publication No. WO 91/05058 dated Apr. 18, 1991; and Mattheakis et al., 1994, Proc. Natl. Acad. Sci. USA 91:9022-9026.

[0855] By way of examples of nonpeptide libraries, a benzodiazepine library (see e.g., Bunin et al., 1994, Proc. Natl. Acad. Sci. USA 91:4708-4712) can be adapted for use. Peptoid libraries (Simon et al., 1992, Proc. Natl. Acad. Sci. USA 89:9367-9371) can also be used. Another example of a library that can be used, in which the amide functionalities in peptides have been permethylated to generate a chemically transformed combinatorial library, is described by Ostresh et al. (1994, Proc. Natl. Acad. Sci. USA 91:11138-11142).

[0856] The variety of non-peptide libraries that are useful in the present invention is great. For example, Ecker and Crooke, 1995, Bio/Technology 13:351-360 list benzodiazepines, hydantoins, piperazinediones, biphenyls, sugar analogs, beta-mercaptoketones, arylacetic acids, acylpiperidines, benzopyrans, cubanes, xanthines, aminimides, and oxazolones as among the chemical species that form the basis of various libraries.

[0857] Non-peptide libraries can be classified broadly into two types: decorated monomers and oligomers. Decorated monomer libraries employ a relatively simple scaffold structure upon which a variety functional groups is added., Often the scaffold will be a molecule with a known useful pharmacological activity. For example, the scaffold might be the benzodiazepine structure.

[0858] Non-peptide oligomer libraries utilize a large number of monomers that are assembled together in ways that create new shapes that depend on the order of the monomers. Among the monomer units that have been used are carbamates, pyrrolinones, and morpholinos. Peptoids, peptide-like oligomers in which the side chain is attached to the alpha amino group rather than the alpha carbon, form the basis of another version of non-peptide oligomer libraries. The first non-peptide oligomer libraries utilized a single type of monomer and thus contained a repeating backbone. Recent libraries have utilized more than one monomer, giving the libraries added flexibility.

[0859] Screening the libraries can be accomplished by any of a variety of commonly known methods. See, e.g., the following references, which disclose screening of peptide libraries: Parmley and Smith, 0.1989, Adv. Exp. Med. Biol. 251:215-218; Scott and Smith, 1990, Science 249:386-390; Fowlkes et al., 1992; BioTechniques 13:422-427; Oldenburg et al., 1992, Proc. Natl. Acad. Sci. USA 89:5393-5397; Yu et al., 1994, Cell 76:933-945; Staudt et al., 1988, Science 241:577-580; Bock et al., 1992, Nature 355:564-566; Tuerk et al., 1992, Proc. Natl. Acad. Sci. USA 89:6988-6992; Ellington et al., 1992, Nature 355:850-852; U.S. Pat. No. 5,096,815, U.S. Pat. No. 5,223,409, and U.S. Pat. No. 5,198,346, all to Ladner et al.; Rebar and Pabo, 1993, Science 263:671-673; and CT Publication No. WO 94/18318.

[0860] In a specific embodiment, screening to identify a molecule that binds endocrine antigen polypeptides can be carried out by contacting the library members with an endocrine antigen polypeptides or endocrine antigen-like polypeptides immobilized on a solid phase and harvesting those library members that bind to the endocrine antigen polypeptides or endocrine antigen-like polypeptides. Examples of such screening methods, termed “panning” techniques are described by way of example in Parmley and Smith, 1988, Gene 73:305-318; Fowlkes et al., 1992, BioTechniques 13:422-427; International Publication No. WO 94/18318; and in references cited herein.

[0861] In another embodiment, the two-hybrid system for selecting interacting proteins in yeast (Fields and Song, 1989, Nature 340:245-246; Chien et al., 1991, Proc. Natl. Acad. Sci. USA 88:9578-9582) can be used to identify molecules that specifically bind to endocrine antigen polypeptides or endocrine antigen-like polypeptides.

[0862] Where the endocrine antigen binding molecule is a polypeptide, the polypeptide can be conveniently selected from any peptide library, including random peptide libraries, combinatorial peptide libraries, or biased peptide libraries. The term “biased” is used herein to mean that the method of generating the library is manipulated so as to restrict one or more parameters that govern the diversity of the resulting collection of molecules, in this case peptides.

[0863] Thus, a truly random peptide library would generate a collection of peptides in which the probability of finding a particular amino acid at a given position of the peptide is the same for all 20 amino acids. A bias can be introduced into the library, however, by specifying, for example, that a lysine occur every fifth amino acid or that positions 4, 8, and 9 of a decapeptide library be fixed to include only arginine. Clearly, many types of biases can be contemplated, and the present invention is not restricted to any particular bias. Furthermore, the present invention contemplates specific types of peptide libraries, such as phage displayed peptide libraries and those that utilize a DNA construct comprising a lambda phage vector with a DNA insert.

[0864] As mentioned above, in the case of an endocrine antigen binding molecule that is a polypeptide, the polypeptide may have about 6 to less than about 60 amino acid residues, preferably about 6 to about 10 amino acid residues, and most preferably, about 6 to about 22 amino acids. In another embodiment, an endocrine antigen binding polypeptide has in the range of 15-100 amino acids, or 20-50 amino acids.

[0865] The selected endocrine antigen binding polypeptide can be obtained by chemical synthesis or recombinant expression.

[0866] Other Activities

[0867] A polypeptide, polynucleotide, agonist, or antagonist of the present invention, as a result of the ability to stimulate vascular endothelial cell growth, may be employed in treatment for stimulating re-vascularization of ischemic tissues due to various disease conditions such as thrombosis, arteriosclerosis, and other cardiovascular conditions. The polypeptide, polynucleotide, agonist, or antagonist of the present. invention may also be employed to stimulate angiogenesis and limb regeneration, as discussed above.

[0868] A polypeptide, polynucleotide, agonist, or antagonist of the present invention may also be employed for treating wounds due to injuries, burns, post-operative tissue repair, and ulcers since they are mitogenic to various cells of different origins, such as fibroblast cells and skeletal muscle cells, and therefore, facilitate the repair or replacement of damaged or diseased tissue.

[0869] A polypeptide, polynucleotide, agonist, or antagonist of the present invention may also be employed to stimulate neuronal growth and to treat and prevent neuronal damage which occurs in certain neuronal disorders or neuro-degenerative conditions such as Alzheimer's disease, Parkinson's disease, and AIDS-related complex. A polypeptide, polynucleotide, agonist, or antagonist of the present invention may have the. ability to stimulate chondrocyte growth; therefore, they may be employed to enhance bone and periodontal regeneration and aid in tissue transplants or bone grafts.

[0870] A polypeptide, polynucleotide, agonist, or antagonist of the present invention may be also be employed to prevent skin aging due to sunburn by stimulating keratinocyte growth.

[0871] A polypeptide, polynucleotide, agonist, or antagonist of the present invention may also be employed for preventing hair loss, since FGF family members activate hair-forming cells and promotes melanocyte growth. Along the same lines, a polypeptide, polynucleotide, agonist, or antagonist of the present invention may be employed to stimulate growth and differentiation of hematopoletic cells and bone marrow cells when used in combination with other cytokines.

[0872] A polypeptide, polynucleotide, agonist, or antagonist of the present invention may also be employed to maintain organs before transplantation or for supporting cell culture of primary tissues. A polypeptide, polynucleotide, agonist, or antagonist of the present invention may also be employed for inducing tissue of mesodermal origin to differentiate in early embryos.

[0873] A polypeptide, polynucleotide, agonist, or antagonist of the present invention may also increase or decrease the differentiation or proliferation of embryonic stem cells, besides, as discussed above, hematopoietic lineage.

[0874] A polypeptide, polynucleotide, agonist, or antagonist of the present invention may also be used to modulate mammalian characteristics, such as body height, weight, hair color, eye color, skin, percentage of adipose tissue, pigmentation, size, and shape (e.g., cosmetic surgery). Similarly, a polypeptide, polynucleotide, agonist, or antagonist of the present invention may be used to modulate mammalian metabolism affecting catabolism, anabolism, processing, utilization, and storage of energy.

[0875] A polypeptide, polynucleotide, agonist, or antagonist of the present invention may be used to change a mammal's mental state or physical state by influencing biorhythms, caricadic rhythms, depression (including depressive disorders), tendency for violence, tolerance for pain, reproductive capabilities (preferably by Activin or Inhibin-like activity), hormonal or endocrine levels, appetite, libido, memory, stress, or other cognitive qualities.

[0876] A polypeptide, polynucleotide, agonist, or antagonist of the present invention may also be used as a food additive or preservative, such as to increase or decrease storage capabilities, fat content, lipid, protein, carbohydrate, vitamins, minerals, cofactors or other nutritional components.

[0877] The above-recited applications have uses in a wide variety of hosts. Such hosts include, but are not limited to, human, murine, rabbit, goat, guinea pig, camel, horse, mouse, rat, hamster, pig, micro-pig, chicken, goat, cow, sheep, dog, cat, non-human primate, and human. In specific embodiments, the host is a mouse, rabbit, goat, guinea pig, chicken, rat, hamster, pig, sheep, dog or cat. In preferred embodiments, the host is a mammal. In most preferred embodiments, the host is a human.

[0878] Other Preferred Embodiments

[0879] Other preferred embodiments of the claimed invention include an isolated nucleic acid molecule comprising a nucleotide sequence which is at least 95% identical to a sequence of at least about 50 contiguous nucleotides in the nucleotide sequence of SEQ ID NO:X or the complementary strand thereto, the nucleotide sequence as defined in column 4 of Table 1A or columns 8 and 9 of Table 2 or the complementary strand thereto, and/or cDNA contained in Clone ID NO:Z.

[0880] Also preferred is a nucleic acid molecule wherein said sequence of contiguous nucleotides is included in the nucleotide sequence of the portion of SEQ ID NO:X as defined in column 4, “ORF (From-To)”, in Table 1A.

[0881] Also preferred is a nucleic acid molecule wherein said sequence of contiguous nucleotides is included in the nucleotide sequence of the portion of SEQ ID NO:X as defined in columns 8 and 9, “NT From” and “NT To” respectively, in Table 2.

[0882] Also preferred is an isolated nucleic acid molecule comprising a nucleotide sequence which is at least 95% identical to a sequence of at least about 150 contiguous nucleotides in the nucleotide sequence of SEQ ID NO:X or the complementary strand thereto, the nucleotide sequence as defined in column 4 of Table 1A or columns 8 and 9 of Table 2 or the complementary strand thereto, and/or cDNA contained in Clone ID NO:Z.

[0883] Further preferred is an isolated nucleic acid molecule comprising a nucleotide sequence which is at least 95% identical to a sequence of at least about 500 contiguous nucleotides in the nucleotide sequence of SEQ ID NO:X or the complementary strand thereto, the nucleotide sequence as defined in column 4 of Table 1A or columns 8 and 9 of Table 2 or the complementary strand thereto, and/or cDNA contained in Clone ID NO:Z.

[0884] A further preferred embodiment is a nucleic acid molecule comprising a nucleotide sequence which is at least 95% identical to the nucleotide sequence of the portion of SEQ ID NO:X defined in column 4, “ORF (From-To)”, in Table 1A.

[0885] A further preferred embodiment is a nucleic acid molecule comprising a nucleotide sequence which is at least 95% identical to the nucleotide sequence of the portion of SEQ ID NO:X defined in columns 8 and 9, “NT From” and “NT To”, respectively, in Table 2.

[0886] A further preferred embodiment is an isolated nucleic acid molecule comprising a nucleotide sequence which is at least 95% identical to the complete nucleotide sequence of SEQ ID NO:X or the complementary strand thereto, the nucleotide sequence as defined in column 4 of Table 1A or columns 8 and 9 of Table 2 or the complementary strand thereto, and/or cDNA contained in Clone ID NO:Z.

[0887] Also preferred is an isolated nucleic acid molecule which hybridizes under stringent hybridization conditions to a nucleic acid molecule comprising a nucleotide sequence of SEQ ID NO:X or the complementary strand thereto, the nucleotide sequence as defined in column 4 of Table 1A or columns 8 and 9 of Table 2 or the complementary strand thereto, and/or cDNA contained in Clone ID NO:Z, wherein said nucleic acid molecule which hybridizes does not hybridize under stringent hybridization conditions to a nucleic acid molecule having a nucleotide sequence consisting of only A residues or of only T residues.

[0888] Also preferred is a composition of matter comprising a DNA molecule which comprises the cDNA contained in Clone ID NO:Z.

[0889] Also preferred is an isolated nucleic acid molecule comprising a nucleotide sequence which is at least 95% identical to a sequence of at least 50 contiguous nucleotides of the cDNA sequence contained in Clone ID NO:Z.

[0890] Also preferred is an isolated nucleic acid molecule, wherein said sequence of at least 50 contiguous nucleotides is included in the nucleotide sequence of an open reading frame sequence encoded by cDNA contained in Clone ID NO:Z.

[0891] Also preferred is an isolated nucleic acid molecule comprising a nucleotide sequence which is at least 95% identical to sequence of at least 150 contiguous nucleotides in the nucleotide sequence encoded by cDNA contained in Clone ID NO:Z.

[0892] A further preferred embodiment is an isolated nucleic acid molecule comprising a nucleotide sequence which is at least 95% identical to sequence of at least 500 contiguous nucleotides in the nucleotide sequence encoded by cDNA contained in Clone ID NO:Z.

[0893] A further preferred embodiment is an isolated nucleic acid molecule comprising a nucleotide sequence which is at least 95% identical to the complete nucleotide sequence encoded by cDNA, contained in Clone ID NO:Z.

[0894] A further preferred embodiment is a method for detecting in a biological sample a nucleic acid molecule comprising a nucleotide sequence which is at least 95% identical to a sequence of at least 50 contiguous nucleotides in a sequence selected from the group consisting of: a nucleotide sequence of SEQ ID NO:X or the complementary strand thereto; the nucleotide sequence as defined in column 4 of Table 1A or columns 8 and 9 of Table 2 or the complementary strand thereto; and a nucleotide sequence encoded by cDNA contained in Clone ID NO:Z; which method comprises a step of comparing a nucleotide sequence of at least one nucleic acid molecule in said sample with a sequence selected from said-group and determining whether the sequence of said nucleic acid molecule in said sample is at least 95% identical to said selected sequence.

[0895] Also preferred is the above method wherein said step of comparing sequences comprises determining the extent of nucleic acid hybridization between nucleic acid molecules in said sample and a nucleic acid molecule comprising said sequence selected from said group. Similarly, also preferred is the above method wherein said step of comparing sequences is performed by comparing the nucleotide sequence determined from a nucleic acid molecule in said sample with said sequence selected from said group. The nucleic acid molecules can comprise DNA molecules or RNA molecules.

[0896] A further preferred embodiment is a method for identifying the species, tissue or cell type of a biological sample which method comprises a step of detecting nucleic acid molecules in said sample, if any, comprising a nucleotide sequence that is at least 95% identical to a sequence of at least 50 contiguous nucleotides in a sequence selected from the group consisting of: a nucleotide sequence of SEQ ID NO:X or the complementary strand thereto; the nucleotide sequence as defined in column 4 of Table 1A or columns 8 and 9 of Table 2 or the complementary strand thereto; and a nucleotide sequence of the cDNA contained in Clone ID NO:Z.

[0897] The method for identifying the species, tissue or cell type of a biological sample can comprise a step of detecting nucleic acid molecules comprising a nucleotide sequence in a panel of at least two nucleotide sequences, wherein at least one sequence in said panel is at least 95% identical to a sequence of at least 50 contiguous nucleotides in a sequence selected from said group.

[0898] Also preferred is a method for diagnosing in a subject a pathological condition associated with abnormal structure or expression of a nucleotide sequence of SEQ ID NO:X or the complementary strand thereto; the nucleotide sequence as defined in column 4 of Table 1A or columns 8 and 9 of Table 2 or the complementary strand thereto; or the cDNA contained in Clone ID NO:Z which encodes a protein, wherein the method comprises a step of detecting in a biological sample obtained from said subject nucleic acid molecules, if any, comprising a nucleotide sequence that is at least 95% identical to a sequence of at least 50 contiguous nucleotides in a sequence selected from the group consisting of: a nucleotide sequence of SEQ ID NO:X or the complementary strand thereto; the nucleotide sequence as defined in column 4 of Table 1A or columns 8 and 9 of Table 2 or the complementary strand thereto; and a nucleotide sequence of cDNA contained in Clone ID NO:Z.

[0899] The method for diagnosing a pathological condition can comprise a step of detecting nucleic acid molecules comprising a nucleotide sequence in a panel of at least two nucleotide sequences, wherein at least one sequence in said panel is at least 95% identical to a sequence of at least 50 contiguous nucleotides in a sequence selected from said group.

[0900] Also preferred is a composition of matter comprising isolated nucleic acid molecules wherein the nucleotide sequences of said nucleic acid molecules comprise a panel of at least two nucleotide sequences, wherein at least one sequence in said panel is at least 95% identical to a sequence of at least 50 contiguous nucleotides in a sequence selected from the group consisting of: a nucleotide sequence of SEQ ID NO:X or the complementary strand thereto; the nucleotide sequence as defined in column 4 of Table 1A or columns 8 and 9 of Table 2 or the complementary strand thereto; and a nucleotide sequence encoded by cDNA contained in Clone ID NO:Z. The nucleic acid molecules can comprise DNA molecules or RNA molecules.

[0901] Also preferred is a composition of matter comprising isolated nucleic acid molecules wherein the nucleotide sequences of said nucleic acid molecules comprise a DNA microarray or “chip” of at least 1, 2, 3, 4, 5, 6, 7, 8, 9, 10, 15, 20, 25, 30, 40, 50, 100, 150, 200, 250, 300, 500, 1000, 2000, 3000, or 4000 nucleotide sequences, wherein at least one sequence in said DNA microarray or “chip” is at least 95% identical to a sequence of at least 50 contiguous nucleotides in a sequence selected from the group consisting of: a nucleotide sequence of SEQ ID NO:X wherein X is any integer as defined in Table 1A; and a nucleotide sequence encoded by a human cDNA clone identified by a cDNA “Clone ID” in Table 1A.

[0902] Also preferred is an isolated polypeptide comprising an amino acid sequence at least 90% identical to a sequence of at least about 10 contiguous amino acids in the polypeptide sequence of SEQ ID NO:Y; a polypeptide encoded by SEQ ID NO:X or the complementary strand thereto; the polypeptide encoded by the nucleotide sequence as defined in columns 8 and 9 of Table 2; and/or a polypeptide encoded by cDNA contained in Clone ID NO:Z.

[0903] Also preferred is an isolated polypeptide comprising an amino acid sequence at least 95% identical to a sequence of at least about 30 contiguous amino acids in the amino acid sequence of SEQ ID NO:Y; a polypeptide encoded by SEQ ID NO:X or the complementary strand thereto; the polypeptide encoded by the nucleotide sequence as defined in columns 8 and 9 of Table 2; and/or a polypeptide encoded by cDNA contained in Clone ID NO:Z.

[0904] Further preferred is an isolated polypeptide comprising an amino acid sequence at least 95% identical to a sequence of at least about 100 contiguous amino acids in the amino acid sequence of SEQ ID NO:Y; a polypeptide encoded by SEQ ID NO:X or the complementary strand thereto; the polypeptide encoded by the nucleotide sequence as defined in columns 8 and 9 of Table 2; and/or a polypeptide encoded by cDNA contained in Clone ID NO:Z.

[0905] Further preferred is an isolated polypeptide comprising an amino acid sequence at least 95% identical to the complete amino acid sequence of SEQ ID NO:Y; a polypeptide encoded by SEQ ID NO:X or the complementary strand thereto; the polypeptide encoded by the nucleotide sequence as defined in columns 8 and 9 of Table 2; and/or a polypeptide encoded by cDNA contained in Clone ID NO:Z.

[0906] Further preferred is an isolated polypeptide comprising an amino acid sequence at least 90% identical to a sequence of at least about 10 contiguous amino acids in the complete amino acid sequence of a polypeptide encoded by contained in Clone ID NO:Z

[0907] Also preferred is a polypeptide wherein said sequence of contiguous amino acids is included in the amino acid sequence of a portion of said polypeptide encoded by cDNA contained in Clone ID NO:Z; a polypeptide encoded by SEQ ID NO:X or the complementary strand thereto; the polypeptide encoded by the nucleotide sequence as defined in columns 8 and 9 of Table 2; and/or the polypeptide sequence of SEQ ID NO:Y.

[0908] Also preferred is an isolated polypeptide comprising an amino acid sequence at least 95% identical to a sequence of at least about 30 contiguous amino acids in the amino acid sequence of a polypeptide encoded by the cDNA contained in Clone ID NO:Z.

[0909] Also preferred is an isolated polypeptide comprising an amino acid sequence at least 95% identical to a sequence of at least about 100 contiguous amino acids in the amino acid sequence of a polypeptide encoded by cDNA contained in Clone ID NO:Z.

[0910] Also preferred is an isolated polypeptide comprising an amino acid sequence at least 95% identical to the amino acid sequence of a polypeptide encoded by the cDNA contained in Clone ID NO:Z.

[0911] Further preferred is an isolated antibody which binds specifically to a polypeptide comprising an amino acid sequence that is at least 90% identical to a sequence of at least 10 contiguous amino acids in a sequence selected from the group consisting of: a polypeptide sequence of SEQ ID NO:Y; a polypeptide encoded by SEQ ID NO:X or the complementary strand thereto; the polypeptide encoded by the nucleotide sequence as defined in columns 8 and 9 of Table 2; and a polypeptide encoded by the cDNA contained in Clone ID NO:Z.

[0912] Further preferred is a method for detecting in a biological sample a polypeptide comprising an amino acid sequence which is at least 90% identical to a sequence of at least 10 contiguous amino acids in a sequence selected from the group consisting of: a polypeptide sequence of SEQ ID NO:Y; a polypeptide encoded by SEQ ID NO:X or the complementary strand thereto; the polypeptide encoded by the nucleotide sequence as defined in columns 8 and 9 of Table 2; and a polypeptide encoded by the cDNA contained in Clone ID NO:Z; which method comprises a step of comparing an amino acid sequence of at least one polypeptide molecule in said sample with a sequence selected from said group and determining whether the sequence of said polypeptide molecule in said sample is at least 90% identical to said sequence of at least 10 contiguous amino acids.

[0913] Also preferred is the above method wherein said step of comparing an amino acid sequence of at least one polypeptide molecule in said sample with a sequence selected from said group comprises determining the extent of specific binding of polypeptides in said sample to an antibody which binds specifically to a polypeptide comprising an amino acid sequence that is at least 90% identical to a sequence of at least 10 contiguous amino acids in a sequence selected from the group consisting of: a polypeptide sequence of SEQ ID NO:Y; a polypeptide encoded by SEQ ID NO:X or the complementary strand thereto; the polypeptide encoded by the nucleotide sequence as defined in columns 8 and 9 of Table 2; and a polypeptide encoded by the cDNA contained in Clone ID NO:Z.

[0914] Also preferred is the above method wherein said step of comparing sequences is performed by comparing the amino acid sequence determined from a polypeptide molecule in said sample with said sequence selected from said group.

[0915] Also preferred is a method for identifying the species, tissue or cell type of a biological sample which method comprises a step of detecting polypeptide molecules in said sample, if any, comprising an amino acid sequence that is at least 90% identical to a sequence of at least 10 contiguous amino acids in a sequence selected from the group consisting of: polypeptide sequence of SEQ ID NO:Y; a polypeptide encoded by SEQ ID NO:X or the complementary strand thereto; the polypeptide encoded by the nucleotide sequence as defined in columns 8 and 9 of Table 2; and a polypeptide encoded by the cDNA contained in Clone ID NO:Z.

[0916] Also preferred is the above method for identifying the species, tissue or cell type of a biological sample, which method comprises a step of detecting polypeptide molecules comprising an amino acid sequence in a panel of at least two amino acid sequences, wherein at least one sequence in said panel is at least 90% identical to a sequence of at least 10 contiguous amino acids in a sequence selected from the above group.

[0917] Also preferred is a method for diagnosing in a subject a pathological condition associated with abnormal structure or expression of a nucleic acid sequence identified in Table 1A or Table 2 encoding a polypeptide, which method comprises a step of detecting in a biological sample obtained from said subject polypeptide molecules comprising an amino acid sequence in a panel of at least two amino acid sequences, wherein at least one sequence in said panel is at least 90% identical to a sequence of at least 10 contiguous amino acids in a sequence selected from the group consisting of: polypeptide sequence of SEQ ID NO:Y; a polypeptide encoded by SEQ ID NO:X or the complementary strand thereto; the polypeptide encoded by the nucleotide sequence as defined in columns 8 and 9 of Table 2; and a polypeptide encoded by the cDNA contained in Clone ID NO:Z.

[0918] In any of these methods, the step of detecting said polypeptide molecules includes using an antibody.

[0919] Also preferred is an isolated nucleic acid molecule comprising a nucleotide sequence which is at least 95% identical to a nucleotide sequence encoding a polypeptide wherein said polypeptide comprises an amino acid sequence that is at least 90% identical to a sequence of at least 10 contiguous amino acids in a sequence selected from the group consisting of: polypeptide sequence of SEQ ID NO:Y; a polypeptide encoded by SEQ ID NO:X or the complementary strand thereto; the polypeptide encoded by the nucleotide sequence as defined in columns 8 and 9 of Table 2; and a polypeptide encoded by the cDNA contained in Clone ID NO:Z.

[0920] Also preferred is an isolated nucleic acid molecule, wherein said nucleotide sequence encoding a polypeptide has been optimized for expression of said polypeptide in a prokaryotic host.

[0921] Also preferred is a polypeptide molecule, wherein said polypeptide comprises an amino acid sequence selected from the group consisting of: polypeptide sequence of SEQ ID NO:Y; a polypeptide encoded by SEQ ID NO:X or the complementary strand thereto; the polypeptide encoded by the nucleotide sequence as defined in columns 8 and 9 of Table 2; and a polypeptide encoded by the cDNA contained in Clone ID NO:Z.

[0922] Further preferred is a method of making a recombinant vector comprising inserting any of the above isolated nucleic acid molecule into a vector. Also preferred is the recombinant vector produced by this method. Also preferred is a method of making a recombinant host cell comprising introducing the vector into a host cell, as well as the recombinant host cell produced by this method.

[0923] Also preferred is a method of making an isolated polypeptide comprising culturing this recombinant host cell under conditions such that said polypeptide is expressed and recovering said polypeptide. Also preferred is this method of making an isolated polypeptide, wherein said recombinant host cell is a eukaryotic cell and said polypeptide is a human protein comprising an amino acid sequence selected from the group consisting of: polypeptide sequence of SEQ ID NO:Y; a polypeptide encoded by SEQ ID NO:X or the complementary strand thereto; the polypeptide encoded by the nucleotide sequence as defined in columns 8 and 9 of Table 2; and a polypeptide encoded by the cDNA contained in Clone ID NO:Z. The isolated polypeptide produced by this method is also preferred.

[0924] Also preferred is a method of treatment of an individual in need of an increased level of a protein activity, which method comprises administering to such an individual a Therapeutic comprising an amount of an isolated polypeptide, polynucleotide, immunogenic fragment or analogue thereof, binding agent, antibody, or antigen binding fragment of the claimed invention effective to increase the level of said protein activity in said individual.

[0925] Also preferred is a method of treatment of an individual in need of a decreased level of a protein activity, which method comprised administering to such an individual a Therapeutic comprising an amount of an isolated polypeptide, polynucleotide, immunogenic fragment or analogue thereof, binding agent, antibody, or antigen binding fragment of the claimed invention effective to decrease the level of said protein activity in said individual.

[0926] Also preferred is a method of treatment of an individual in need of a specific delivery of toxic compositions to diseased cells (e.g., tumors, leukemias or lymphomas), which method comprises administering to such an individual a Therapeutic comprising an amount of an isolated polypeptide of the invention, including, but not limited to a binding agent, or antibody of the claimed invention that are associated with toxin or cytotoxic prodrugs.

[0927] Having generally described the invention, the same will be more readily understood by reference to the following examples, which are provided by way of illustration and are not intended as limiting.

TABLE 6

| ATCC Deposits | Deposit Date | ATCC Designation Number |
|---|---|---|
| LP01, LP02, LP03, | May-20-97 | 209059, 209060, 209061, |
| LP04, LP05, LP06, | | 209062, 209063, |
| LP07, LP08, LP09, | | 209064, 209065, 209066, |
| LP10, LP11, | | 209067, 209068, 209069 |
| LP12 | Jan-12-98 | 209579 |
| LP13 | Jan-12-98 | 209578 |
| LP14 | Jul-16-98 | 203067 |
| LP15 | Jul-16-98 | 203068 |
| LP16 | Feb-1-99 | 203609 |
| LP17 | Feb-1-99 | 203610 |
| LP20 | Nov-17-98 | 203485 |
| LP21 | Jun-18-99 | PTA-252 |
| LP22 | Jun-18-99 | PTA-253 |
| LP23 | Dec-22-99 | PTA-1081 |

### EXAMPLES

### Example 1

### Isolation of a Selected cDNA Clone from the Deposited Sample

[0928] Each Clone ID NO:Z is contained in a plasmid. Table 7 identifies the vectors used to construct the cDNA library from which each clone was isolated. In many cases, the vector used to construct the library is a phage vector from which a plasmid has been excised. The following correlates the related plasmid for each phage vector used in constructing the cDNA library. For example, where a particular clone is identified in Table 7 as being isolated in the vector “Lambda Zap,” the corresponding deposited clone is in “pBluescript.”

| Vector Used to Construct Library | Corresponding Deposited Plasmid |
|---|---|
| Lambda Zap | pBluescript (pBS) |
| Uni-Zap XR | pBluescript (pBS) |
| Zap Express | pBK |
| lafmid BA | plafmid BA |
| pSport1 | pSport1 |
| pCMVSport 2.0 | pCMVSport 2.0 |
| pCMVSport 3.0 | pCMVSport 3.0 |
| pCR ®2.1 | pCR ®2.1 |

[0929] Vectors Lambda Zap (U.S. Pat. Nos. 5,128,256 and 5,286,636), Uni-Zap XR (U.S. Pat. Nos. 5,128, 256 and 5,286,636), Zap Express (U.S. Pat. Nos. 5,128,256 and 5,286,636), pBluescript (pBS) (Short, J. M. et al., Nucleic Acids Res. 16:7583-7600 (1988); Alting-Mees, M. A. and Short, J. M., Nucleic Acids Res. 17:9494 (1989)) and pBK (Alting-Mees, M. A. et al., Strategies 5:58-61 (1992)) are commercially available from Stratagene Cloning Systems, Inc., 11011 N. Torrey Pines Road, La Jolla, Calif., 92037. pBS contains an ampicillin resistance gene and pBK contains a neomycin resistance gene. Both can be transformed into E. coli strain XL-1 Blue, also available from Stratagene. pBS comes in 4 forms SK+, SK−, KS+ and KS. The S and K refers to the orientation of the polylinker to the T7 and T3 primer sequences which flank the polylinker region (“S” is for SacI and “K” is for KpnI which are the first sites on each respective end of the linker). “+” or “−” refer to the orientation of the f1 origin of replication (“ori”), such that in one orientation, single stranded rescue initiated from the f1 ori generates sense strand DNA and in the other, antisense.

[0930] Vectors pSport1, pCMVSport 2.0 and pCMVSport 3.0, were obtained from Life Technologies, Inc., P. O. Box 6009, Gaithersburg, Md. 20897. All Sport vectors contain an ampicillin resistance gene and may be transformed into E. coli strain DH10B, also available from Life Technologies. (See, for instance, Gruber, C. E., et al., Focus 15:59 (1993).) Vector lafmid BA (Bento Soares, Columbia University, NY) contains an ampicillin resistance gene and can be transformed into E. coli strain XL-1 Blue. Vector pCR®2.1, which is available from Invitrogen, 1600 Faraday Avenue, Carlsbad, Calif. 92008, contains an ampicillin resistance gene and may be transformed into E. coli strain DH10B, available from Life Technologies. (See, for instance, Clark, J. M., Nuc. Acids Res. 16:9677-9686 (1988) and Mead, D. et al., Bio/Technology 9: (1991).) Preferably, a polynucleotide of the present invention does not comprise the vector sequences identified for the particular clone in Table 7, as well as the corresponding plasmid vector sequences designated above.

[0931] The deposited material in the sample assigned the ATCC Deposit Number cited by reference to Tables 1A, 2, 6 and 7 for any given cDNA clone also may contain one or more additional plasmids, each comprising a cDNA clone different from that given clone. Thus, deposits sharing the same ATCC Deposit Number contain at least a plasmid for each Clone ID NO:Z.

TABLE 7

| | | | ATCC |
|---|---|---|---|
| Libraries owned by Catalog | Catalog Description | Vector | Deposit |
| HUKA HUKB HUKC HUKD HUKE | Human Uterine Cancer | Lambda ZAP II | LP01 |
| HUKF HUKG | | | |
| HCNA HCNB | Human Colon | Lambda Zap II | LP01 |
| HFFA | Human Fetal Brain, random primed | Lambda Zap II | LP01 |
| HTWA | Resting T-Cell | Lambda ZAP II | LP01 |
| HBQA | Early Stage Human Brain, random | Lambda ZAP II | LP01 |
| | primed | | |
| HLMB HLMF HLMG HLMH HLMI | breast lymph node CDNA library | Lambda ZAP II | LP01 |
| HLMJ HLMM HLMN | | | |
| HCQA HCQB | human colon cancer | Lamda ZAP II | LP01 |
| HMEA HMEC HMED HMEE HMEF | Human Microvascular Endothelial | Lambda ZAP II | LP01 |
| HMEG HMEI HMEJ HMEK HMEL | Cells, fract. A | | |
| HUSA HUSC | Human Umbilical Vein Endothelial | Lambda ZAP II | LP01 |
| | Cells, fract. A | | |
| HLQA HLQB | Hepatocellular Tumor | Lambda ZAP II | LP01 |
| HHGA HHGB HHGC HHGD | Hemangiopericytoma | Lambda ZAP II | LP01 |
| HSDM | Human Striatum Depression, re-rescue | Lambda ZAP II | LP01 |
| HUSH | H Umbilical Vein Endothelial Cells, | Lambda ZAP II | LP01 |
| | frac A, re-excision | | |
| HSGS | Salivary gland, subtracted | Lambda ZAP II | LP01 |
| HFXA HFXB HFXC HFXD HFXE | Brain frontal cortex | Lambda ZAP II | LP01 |
| HFXF HFXG HFXH | | | |
| HPQA HPQB HPQC | PERM TF274 | Lambda ZAP II | LP01 |
| HFXJ HFXK | Brain Frontal Cortex, re-excision | Lambda ZAP II | LP01 |
| HCWA HCWB HCWC HCWD HCWE | CD34 positive cells (Cord Blood) | ZAP Express | LP02 |
| HCWF HCWG HCWH HCWI HCWJ | | | |
| HCWK | | | |
| HCUA HCUB HCUC | CD34 depleted Buffy Coat (Cord | ZAP Express | LP02 |
| | Blood) | | |
| HRSM | A-14 cell line | ZAP Express | LP02 |
| HRSA | A1-CELL LINE | ZAP Express | LP02 |
| HCUD HCUE HCUF HCUG HCUH | CD34 depleted Buffy Coat (Cord | ZAP Express | LP02 |
| HCUI | Blood), re-excision | | |
| HBXE HBXF HBXG | H. Whole Brain #2, re-excision | ZAP Express | LP02 |
| HRLM | L8 cell line | ZAP Express | LP02 |
| HBXA HBXB HBXC HBXD | Human Whole Brain #2 - Oligo dT > | ZAP Express | LP02 |
| | 1.5 Kb | | |
| HUDA HUDB HUDC | Testes | ZAP Express | LP02 |
| HHTM HHTN HHTO | H. hypothalamus, frac A; re-excision | ZAP Express | LP02 |
| HHTL | H. hypothalamus, frac A | ZAP Express | LP02 |
| HASA HASD | Human Adult Spleen | Uni-ZAP XR | LP03 |
| HFKC HFKD HFKE HFKF HFKG | Human Fetal Kidney | Uni-ZAP XR | LP03 |
| HE8A HE8B HE8C HE8D HE8E HE8F | Human 8 Week Whole Embryo | Uni-ZAP XR | LP03 |
| HE8M HE8N | | | |
| HGBA HGBD HGBE HGBF HGBG | Human Gall Bladder | Uni-ZAP XR | LP03 |
| HGBH HGBI | | | |
| HLHA HLHB HLHC HLHD HLHE | Human Fetal Lung III | Uni-ZAP XR | LP03 |
| HLHF HLHG HLHH HLHQ | | | |
| HPMA HPMB HPMC HPMD HPME | Human Placenta | Uni-ZAP XR | LP03 |
| HPMF HPMG HPMH | | | |
| HPRA HPRB HPRC HPRD | Human Prostate | Uni-ZAP XR | LP03 |
| HSIA HSIC HSID HSIE | Human Adult Small Intestine | Uni-ZAP XR | LP03 |
| HTEA HTEB HTEC HTED HTEE | Human Testes | Uni-ZAP XR | LP03 |
| HTEF HTEG HTEH HTEI HTEJ HTEK | | | |
| HTPA HTPB HTPC HTPD HTPE | Human Pancreas Tumor | Uni-ZAP XR | LP03 |
| HTTA HTTB HTTC HTTD HTTE | Human Testes Tumor | Uni-ZAP XR | LP03 |
| HTTF | | | |
| HAPA HAPB HAPC HAPM | Human Adult Pulmonary | Uni-ZAP XR | LP03 |
| HETA HETB HETC HETD HETE | Human Endometrial Tumor | Uni-ZAP XR | LP03 |
| HETF HETG HETH HETI | | | |
| HHFB HHFC HHFD HHFE HHFF | Human Fetal Heart | Uni-ZAP XR | LP03 |
| HHFG HHFH HHFI | | | |
| HHPB HHPC HHPD HHPE HHPF | Human Hippocampus | Uni-ZAP XR | LP03 |
| HHPG HHPH | | | |
| HCE1 HCE2 HCE3 HCE4 HCE5 HCEB | Human Cerebellum | Uni-ZAP XR | LP03 |
| HCEC HCED HCEE HCEF HCEG | | | |
| HUVB HUVC HUVD HUVE | Human Umbilical Vein, Endo remake | Uni-ZAP XR | LP03 |
| HSTA HSTB HSTC HSTD | Human Skin Tumor | Uni-ZAP XR | LP03 |
| HTAA HTAB HTAC HTAD HTAE | Human Activated T-Cells | Uni-ZAP XR | LP03 |
| HFEA HFEB HFEC | Human Fetal Epithelium (Skin) | Uni-ZAP XR | LP03 |
| HJPA HJPB HJPC HJPD | HUMAN JURKAT MEMBRANE | Uni-ZAP XR | LP03 |
| | BOUND POLYSOMES | | |
| HESA | Human epithelioid sarcoma | Uni-Zap XR | LP03 |
| HLTA HLTB HLTC HLTD HLTE | Human T-Cell Lymphoma | Uni-ZAP XR | LP03 |
| HLTF | | | |
| HFTA HFTB HFTC HFTD | Human Fetal Dura Mater | Uni-ZAP XR | LP03 |
| HRDA HRDB HRDC HRDD HRDE | Human Rhabdomyosarcoma | Uni-ZAP XR | LP03 |
| HRDF | | | |
| HCAA HCAB HCAC | Cem cells cyclohexamide treated | Uni-ZAP XR | LP03 |
| HRGA HRGB HRGC HRGD | Raji Cells, cyclohexamide treated | Uni-ZAP XR | LP03 |
| HSUA HSUB HSUC HSUM | Supt Cells, cyclohexamide treated | Uni-ZAP XR | LP03 |
| HT4A HT4C HT4D | Activated T-Cells, 12 hrs. | Uni-ZAP XR | LP03 |
| HE9A HE9B HE9C HE9D HE9E HE9F | Nine Week Old Early Stage Human | Uni-ZAP XR | LP03 |
| HE9G HE9H HE9M HE9N | | | |
| HATA HATB HATC HATD HATE | Human Adrenal Gland Tumor | Uni-ZAP XR | LP03 |
| HT5A | Activated T-Cells, 24 hrs. | Uni-ZAP XR | LP03 |
| HFGA HFGM | Human Fetal Brain | Uni-ZAP XR | LP03 |
| HNEA HNEB HNEC HNED HNEE | Human Neutrophil | Uni-ZAP XR | LP03 |
| HBGB HBGD | Human Primary Breast Cancer | Uni-ZAP XR | LP03 |
| HBNA HBNB | Human Normal Breast | Uni-ZAP XR | LP03 |
| HCAS | Cem Cells, cyclohexamide treated; | Uni-ZAP XR | LP03 |
| | subtra | | |
| HHPS | Human Hippocampus, subtracted | pBS | LP03 |
| HKCS HKCU | Human Colon Cancer, subtracted | pBS | LP03 |
| HRGS | Raji cells, cyclohexamide treated, | pBS | LP03 |
| | subtracted | | |
| HSUT | Supt cells, cyclohexamide treated, | pBS | LP03 |
| | differentially expressed | | |
| HT4S | Activated T-Cells, 12 hrs, subtracted | Uni-ZAP XR | LP03 |
| HCDA HCDB HCDC HCDD HCDE | Human Chondrosarcoma | Uni-ZAP XR | LP03 |
| HOAA HOAB HOAC | Human Osteosarcoma | Uni-ZAP XR | LP03 |
| HTLA HTLB HTLC HTLD HTLE | Human adult testis, large inserts | Uni-ZAP XR | LP03 |
| HTLF | | | |
| HLMA HLMC HLMD | Breast Lymph node cDNA library | Uni-ZAP XR | LP03 |
| H6EA H6EB H6EC | HL-60, PMA 4H | Uni-ZAP XR | LP03 |
| HTXA HTXB HTXC HTXD HTXE | Activated T-Cell (12 hs)/Thiouridine | Uni-ZAP XR | LP03 |
| HTXF HTXG HTXH | labelledEco | | |
| HNFA HNFB HNFC HNFD HNFE | Human Neutrophil, Activated | Uni-ZAP XR | LP03 |
| HNFF HNFG HNFH HNFJ | | | |
| HTOB HTOC | HUMAN TONSILS, FRACTION 2 | Uni-ZAP XR | LP03 |
| HMGB | Human OB MG63 control fraction I | Uni-ZAP XR | LP03 |
| HOPB | Human OB HOS control fraction I | Uni-ZAP XR | LP03 |
| HORB | Human OB HOS treated (10 nM E2) | Uni-ZAP XR | LP03 |
| | fraction I | | |
| HSVA HSVB HSVC | Human Chronic Synovitis | Uni-ZAP XR | LP03 |
| HROA | HUMAN STOMACH | Uni-ZAP XR | LP03 |
| HBJA HBJB HBJC HBJD HBJE HBJF | HUMAN B CELL LYMPHOMA | Uni-ZAP XR | LP03 |
| HBJG HBJH HBJI HBJJ HBJK | | | |
| HCRA HCRB HCRC | human corpus colosum | Uni-ZAP XR | LP03 |
| HODA HODB HODC HODD | human ovarian cancer | Uni-ZAP XR | LP03 |
| HDSA | Dermatofibrosarcoma Protuberance | Uni-ZAP XR | LP03 |
| HMWA HMWB HMWC HMWD | Bone Marrow Cell Line (RS4; 11) | Uni-ZAP XR | LP03 |
| HMWE HMWF HMWG HMWH | | | |
| HMWI HMWJ | | | |
| HSOA | stomach cancer (human) | Uni-ZAP XR | LP03 |
| HERA | SKIN | Uni-ZAP XR | LP03 |
| HMDA | Brain-medulloblastoma | Uni-ZAP XR | LP03 |
| HGLA HGLB HGLD | Glioblastoma | Uni-ZAP XR | LP03 |
| HEAA | H. Atrophic Endometrium | Uni-ZAP XR | LP03 |
| HBCA HBCB | H. Lymph node breast Cancer | Uni-ZAP XR | LP03 |
| HPWT | Human Prostate BPH, re-excision | Uni-ZAP XR | LP03 |
| HFVG HFVH HFVI | Fetal Liver, subtraction II | pBS | LP03 |
| HNFI | Human Neutrophils, Activated, re- | pBS | LP03 |
| | excision | | |
| HBMB HBMC HBMD | Human Bone Marrow, re-excision | pBS | LP03 |
| HKML HKMM HKMN | H. Kidney Medulla, re-excision | pBS | LP03 |
| HKIX HKIY | H. Kidney Cortex, subtracted | pBS | LP03 |
| HADT | H. Amygdala Depression, subtracted | pBS | LP03 |
| H6AS | HI-60, untreated, subtracted | Uni-ZAP XR | LP03 |
| H6ES | HL-60, PMA 4H, subtracted | Uni-ZAP XR | LP03 |
| H6BS | HL-60, RA 4h, Subtracted | Uni-ZAP XR | LP03 |
| H6CS | HL-60, PMA 1d, subtracted | Uni-ZAP XR | LP03 |
| HTXJ HTXK | Activated T-cell(12 h)/Thiouridine-re- | Uni-ZAP XR | LP03 |
| | excision | | |
| HMSA HMSB HMSC HMSD HMSE | Monocyte activated | Uni-ZAP XR | LP03 |
| HMSF HMSG HMSH HMSI HMSJ | | | |
| HMSK | | | |
| HAGA HAGB HAGC HAGD HAGE | Human Amygdala | Uni-ZAP XR | LP03 |
| HAGF | | | |
| HSRA HSRB HSRE | STROMAL-OSTEOCLASTOMA | Uni-ZAP XR | LP03 |
| HSRD HSRF HSRG HSRH | Human Osteoclastoma Stromal Cells - | Uni-ZAP XR | LP03 |
| | unamplified | | |
| HSQA HSQB HSQC HSQD HSQE | Stromal cell TF274 | Uni-ZAP XR | LP03 |
| HSQF HSQG | | | |
| HSKA HSKB HSKC HSKD HSKE | Smooth muscle, serum treated | Uni-ZAP XR | LP03 |
| HSKF HSKZ | | | |
| HSLA HSLB HSLC HSLD HSLE | Smooth muscle, control | Uni-ZAP XR | LP03 |
| HSLF HSLG | | | |
| HSDA HSDD HSDE HSDF HSDG | Spinal cord | Uni-ZAP XR | LP03 |
| HSDH | | | |
| HPWS | Prostate-BPH subtracted II | pBS | LP03 |
| HSKW HSKX HSKY | Smooth Muscle- HASTE normalized | pBS | LP03 |
| HFPB HFPC HFPD | H. Frontal cortex, epileptic; re-excision | Uni-ZAP XR | LP03 |
| HSDI HSDJ HSDK | Spinal Cord, re-excision | Uni-ZAP XR | LP03 |
| HSKN HSKO | Smooth Muscle Serum Treated, Norm | pBS | LP03 |
| HSKG HSKH HSKI | Smooth muscle, serum induced, re-exc | pBS | LP03 |
| HFCA HFCB HFCC HFCD HFCE | Human Fetal Brain | Uni-ZAP XR | LP04 |
| HFCF | | | |
| HPTA HPTB HPTD | Human Pituitary | Uni-ZAP XR | LP04 |
| HTHB HTHC HTHD | Human Thymus | Uni-ZAP XR | LP04 |
| HE6B HE6C HE6D HE6E HE6F HE6G | Human Whole Six Week Old Embryo | Uni-ZAP XR | LP04 |
| HE6S | | | |
| HSSA HSSB HSSC HSSD HSSE HSSF | Human Synovial Sarcoma | Uni-ZAP XR | LP04 |
| HSSG HSSH HSSI HSSJ HSSK | | | |
| HE7T | 7 Week Old Early Stage Human, | Uni-ZAP XR | LP04 |
| | subtracted | | |
| HEPA HEPB HEPC | Human Epididymus | Uni-ZAP XR | LP04 |
| HSNA HSNB HSNC HSNM HSNN | Human Synovium | Uni-ZAP XR | LP04 |
| HPFB HPFC HPFD HPFE | Human Prostate Cancer, Stage C | Uni-ZAP XR | LP04 |
| | fraction | | |
| HE2A HE2D HE2E HE2H HE2I HE2M | 12 Week Old Early Stage Human | Uni-ZAP XR | LP04 |
| HE2N HE2O | | | |
| HE2B HE2C HE2F HE2G HE2P HE2Q | 12 Week Old Early Stage Human, II | Uni-ZAP XR | LP04 |
| HPTS HPTT HPTU | Human Pituitary, subtracted | Uni-ZAP XR | LP04 |
| HAUA HAUB HAUC | Amniotic Cells - TNF induced | Uni-ZAP XR | LP04 |
| HAQA HAQB HAQC HAQD | Amniotic Cells - Primary Culture | Uni-ZAP XR | LP04 |
| HWTA HWTB HWTC | wilm's tumor | Uni-ZAP XR | LP04 |
| HBSD | Bone Cancer, re-excision | Uni-ZAP XR | LP04 |
| HSGB | Salivary gland, re-excision | Uni-ZAP XR | LP04 |
| HSJA HSJB HSJC | Smooth muscle-ILb induced | Uni-ZAP XR | LP04 |
| HSXA HSXB HSXC HSXD | Human Substantia Nigra | Uni-ZAP XR | LP04 |
| HSHA HSHB HSHC | Smooth muscle, IL1b induced | Uni-ZAP XR | LP04 |
| HOUA HOUB HOUC HOUD HOUE | Adipocytes | Uni-ZAP XR | LP04 |
| HPWA HPWB HPWC HPWD HPWE | Prostate BPH | Uni-ZAP XR | LP04 |
| HELA HELB HELC HELD HELE | Endothelial cells-control | Uni-ZAP XR | LP04 |
| HELF HELG HELH | | | |
| HEMA HEMB HEMC HEMD HEME | Endothelial-induced | Uni-ZAP XR | LP04 |
| HEMF HEMG HEMH | | | |
| HBIA HBIB HBIC | Human Brain, Striatum | Uni-ZAP XR | LP04 |
| HHSA HHSB HHSC HHSD HHSE | Human Hypothalmus, Schizophrenia | Uni-ZAP XR | LP04 |
| HNGA HNGB HNGC HNGD HNGE | neutrophils control | Uni-ZAP XR | LP04 |
| HNGF HNGG HNGH HNGI HNGJ | | | |
| HNHA HNHB HNHC HNHD HNHE | Neutrophils IL-1 and LPS induced | Uni-ZAP XR | LP04 |
| HNHF HNHG HNHH HNHI HNHJ | | | |
| HSDB HSDC | STRIATUM DEPRESSION | Uni-ZAP XR | LP04 |
| HHPT | Hypothalamus | Uni-ZAP XR | LP04 |
| HSAT HSAU HSAV HSAW HSAX | Anergic T-cell | Uni-ZAP XR | LP04 |
| HSAY HSAZ | | | |
| HBMS HBMT HBMU HBMV HBMW | Bone marrow | Uni-ZAP XR | LP04 |
| HBMX | | | |
| HOEA HOEB HOEC HOED HOEE | Osteoblasts | Uni-ZAP XR | LP04 |
| HOEF HOEJ | | | |
| HAIA HAIB HAIC HAID HAIE HAIF | Epithelial-TNFa and INF induced | Uni-ZAP XR | LP04 |
| HTGA HTGB HTGC HTGD | Apoptotic T-cell | Uni-ZAP XR | LP04 |
| HMCA HMCB HMCC HMCD HMCE | Macrophage-oxLDL | Uni-ZAP XR | LP04 |
| HMAA HMAB HMAC HMAD HMAE | Macrophage (GM-CSF treated) | Uni-ZAP XR | LP04 |
| HMAF HMAG | | | |
| HPHA | Normal Prostate | Uni-ZAP XR | LP04 |
| HPIA HPIB HPIC | LNCAP prostate cell line | Uni-ZAP XR | LP04 |
| HPJA HPJB HPJC | PC3 Prostate cell line | Uni-ZAP XR | LP04 |
| HOSE HOSF HOSG | Human Osteoclastoma, re-excision | Uni-ZAP XR | LP04 |
| HTGE HTGF | Apoptotic T-cell, re-excision | Uni-ZAP XR | LP04 |
| HMAJ HMAK | H Macrophage (GM-CSF treated), re- | Uni-ZAP XR | LP04 |
| | excision | | |
| HACB HACC HACD | Human Adipose Tissue, re-excision | Uni-ZAP XR | LP04 |
| HFPA | H. Frontal Cortex, Epileptic | Uni-ZAP XR | LP04 |
| HFAA HFAB HFAC HFAD HFAE | Alzheimer's, spongy change | Uni-ZAP XR | LP04 |
| HFAM | Frontal Lobe, Dementia | Uni-ZAP XR | LP04 |
| HMIA HMIB HMIC | Human Manic Depression Tissue | Uni-ZAP XR | LP04 |
| HTSA HTSE HTSF HTSG HTSH | Human Thymus | pBS | LP05 |
| HPBA HPBB HPBC HPBD HPBE | Human Pineal Gland | pBS | LP05 |
| HSAA HSAB HSAC | HSA 172 Cells | pBS | LP05 |
| HSBA HSBB HSBC HSBM | HSC172 cells | pBS | LP05 |
| HJAA HJAB HJAC HJAD | Jurkat T-cell G1 phase | pBS | LP05 |
| HJBA HJBB HJBC HJBD | Jurkat T-Cell, S phase | pBS | LP05 |
| HAFA HAFB | Aorta endothelial cells + TNF-a | pBS | LP05 |
| HAWA HAWB HAWC | Human White Adipose | pBS | LP05 |
| HTNA HTNB | Human Thyroid | pBS | LP05 |
| HONA | Normal Ovary, Premenopausal | pBS | LP05 |
| HARA HARB | Human Adult Retina | pBS | LP05 |
| HLJA HLJB | Human Lung | pCMVSport 1 | LP06 |
| HOFM HOFN HOFO | H. Ovarian Tumor, II, OV5232 | pCMVSport 2.0 | LP07 |
| HOGA HOGB HOGC | OV 10-3-95 | pCMVSport 2.0 | LP07 |
| HCGL | CD34+ cells, II | pCMVSport 2.0 | LP07 |
| HDLA | Hodgkin's Lymphoma I | pCMVSport 2.0 | LP07 |
| HDTA HDTB HDTC HDTD HDTE | Hodgkin's Lymphoma II | pCMVSport 2.0 | LP07 |
| HKAA HKAB HKAC HKAD HKAE | Keratinocyte | pCMVSport 2.0 | LP07 |
| HKAF HKAG HKAH | | | |
| HCIM | CAPFINDER, Crohn's Disease, lib 2 | pCMVSport 2.0 | LP07 |
| HKAL | Keratinocyte, lib 2 | pCMVSport 2.0 | LP07 |
| HKAT | Keratinocyte, lib 3 | pCMVSport 2.0 | LP07 |
| HNDA | Nasal polyps | pCMVSport 2.0 | LP07 |
| HDRA | H. Primary Dendritic Cells, lib 3 | pCMVSport 2.0 | LP07 |
| HOHA HOHB HOHC | Human Osteoblasts II | pCMVSport 2.0 | LP07 |
| HLDA HLDB HLDC | Liver, Hepatoma | pCMVSport 3.0 | LP08 |
| HLDN HLDO HLDP | Human Liver, normal | pCMVSport 3.0 | LP08 |
| HMTA | pBMC stimulated w/poly I/C | pCMVSport 3.0 | LP08 |
| HNTA | NTERA2, control | pCMVSport 3.0 | LP08 |
| HDPA HDPB HDPC HDPD HDPF | Primary Dendritic Cells, lib 1 | pCMVSport 3.0 | LP08 |
| HDPG HDPH HDPI HDPJ HDPK | | | |
| HDPM HDPN HDPO HDPP | Primary Dendritic cells, frac 2 | pCMVSport 3.0 | LP08 |
| HMUA HMUB HMUC | Myoloid Progenitor Cell Line | pCMVSport 3.0 | LP08 |
| HHEA HHEB HHEC HHED | T Cell helper I | pCMVSport 3.0 | LP08 |
| HHEM HHEN HHEO HHEP | T cell helper II | pCMVSport 3.0 | LP08 |
| HEQA HEQB HEQC | Human endometrial stromal cells | pCMVSport 3.0 | LP08 |
| HJMA HJMB | Human endometrial stromal cells- | pCMVSport 3.0 | LP08 |
| | treated with progesterone | | |
| HSWA HSWB HSWC | Human endometrial stromal cells- | pCMVSport 3.0 | LP08 |
| | treated with estradiol | | |
| HSYA HSYB HSYC | Human Thymus Stromal Cells | pCMVSport 3.0 | LP08 |
| HLWA HLWB HLWC | Human Placenta | pCMVSport 3.0 | LP08 |
| HRAA HRAB HRAC | Rejected Kidney, lib 4 | pCMVSport 3.0 | LP08 |
| HMTM | PCR, pBMC I/C treated | PCRII | LP09 |
| HMJA | H. Meniingima, M6 | pSport 1 | LP10 |
| HMKA HMKB HMKC HMKD HMKE | H. Meningima, M1 | pSport 1 | LP10 |
| HUSG HUSI | Human umbilical vein endothelial cells, | pSport 1 | LP10 |
| | IL-4 induced | | |
| HUSX HUSY | Human Umbilical Vein Endothelial | pSport 1 | LP10 |
| | Cells, uninduced | | |
| HOFA | Ovarian Tumor I, OV5232 | pSport 1 | LP10 |
| HCFA HCFB HCFC HCFD | T-Cell PHA 16 hrs | pSport 1 | LP10 |
| HCFL HCFM HCFN HCFO | T-Cell PHA 24 hrs | pSport 1 | LP10 |
| HADA HADC HADD HADE HADF | Human Adipose | pSport 1 | LP10 |
| HADG | | | |
| HOVA HOVB HOVC | Human Ovary | pSport 1 | LP10 |
| HTWB HTWC HTWD HTWE HTWF | Resting T-Cell Library, II | pSport 1 | LP10 |
| HMMA | Spleen metastic melanoma | pSport 1 | LP10 |
| HLYA HLYB HLYC HLYD HLYE | Spleen, Chronic lymphocytic leukemia | pSport 1 | LP10 |
| HCGA | CD34+ cell, I | pSport 1 | LP10 |
| HEOM HEON | Human Eosinophils | pSport 1 | LP10 |
| HTDA | Human Tonsil, Lib 3 | pSport 1 | LP10 |
| HSPA | Salivary Gland, Lib 2 | pSport 1 | LP10 |
| HCHA HCHB HCHC | Breast Cancer cell line, MDA 36 | pSport 1 | LP10 |
| HCHM HCHN | Breast Cancer Cell line, angiogenic | pSport 1 | LP10 |
| HCIA | Crohn's Disease | pSport 1 | LP10 |
| HDAA HDAB HDAC | HEL cell line | pSport 1 | LP10 |
| HABA | Human Astrocyte | pSport 1 | LP10 |
| HUFA HUFB HUFC | Ulcerative Colitis | pSport 1 | LP10 |
| HNTM | NTERA2 + retinoic acid, 14 days | pSport 1 | LP10 |
| HDQA | Primary Dendritic cells, CapFinder2, | pSport 1 | LP10 |
| | frac 1 | | |
| HDQM | Primary Dendritic Cells, CapFinder, | pSport 1 | LP10 |
| | frac 2 | | |
| HLDX | Human Liver, normal, CapFinder | pSport 1 | LP10 |
| HULA HULB HULC | Human Dermal Endothelial | pSport 1 | LP10 |
| | Cells, untreated | | |
| HUMA | Human Dermal Endothelial cells, treated | pSport 1 | LP10 |
| HCJA | Human Stromal Endometrial | pSport 1 | LP10 |
| | fibroblasts, untreated | | |
| HCJM | Human Stromal endometrial fibroblasts, | pSport 1 | LP10 |
| | treated w/estradiol | | |
| HEDA | Human Stromal endometrial fibroblasts, | pSport 1 | LP10 |
| | treated with progesterone | | |
| HFNA | Human ovary tumor cell OV350721 | pSport 1 | LP10 |
| HKGA HKGB HKGC HKGD | Merkel Cells | pSport 1 | LP10 |
| HISA HISB HISC | Pancreas Islet Cell Tumor | pSport 1 | LP10 |
| HLSA | Skin, burned | pSport 1 | LP10 |
| HBZA | Prostate, BPH, Lib 2 | pSport 1 | LP10 |
| HBZS | Prostate BPH, Lib 2, subtracted | pSport 1 | LP10 |
| HFIA HFIB HFIC | Synovial Fibroblasts (control) | pSport 1 | LP10 |
| HFIH HFII HFIJ | Synovial hypoxia | pSport 1 | LP10 |
| HFIT HFIU HFIV | Synovial IL-1/TNF stimulated | pSport 1 | LP10 |
| HGCA | Messangial cell, frac 1 | pSport 1 | LP10 |
| HMVA HMVB HMVC | Bone Marrow Stromal Cell, untreated | pSport 1 | LP10 |
| HFIX HFIY HFIZ | Synovial Fibroblasts (III/TNF), subt | pSport 1 | LP10 |
| HFOX HFOY HFOZ | Synovial hypoxia-RSF subtracted | pSport 1 | LP10 |
| HMQA HMQB HMQC HMQD | Human Activated Monocytes | Uni-ZAP XR | LP11 |
| HLIA HLIB HLIC | Human Liver | pCMVSport 1 | LP012 |
| HHBA HHBB HHBC HHBD HHBE | Human Heart | pCMVSport 1 | LP012 |
| HBBA HBBB | Human Brain | pCMVSport 1 | LP012 |
| HLJA HLJB HUJC HLJD HLJE | Human Lung | pCMVSport 1 | LP012 |
| HOGA HOGB HOGC | Ovarian Tumor | pCMVSport 2.0 | LP012 |
| HTJM | Human Tonsils, Lib 2 | pCMVSport 2.0 | LP012 |
| HAMF HAMG | KMH2 | pCMVSport 3.0 | LP012 |
| HAJA HAJB HAJC | L428 | pCMVSport 3.0 | LP012 |
| HWBA HWBB HWBC HWBD HWBE | Dendritic cells, pooled | pCMVSport 3.0 | LP012 |
| HWAA HWAB HWAC HWAD HWAE | Human Bone Marrow, treated | pCMVSport 3.0 | LP012 |
| HYAA HYAB HYAC | B Cell lymphoma | pCMVSport 3.0 | LP012 |
| HWHG HWHH HWHI | Healing groin wound, 6.5 hours post | pCMVSport 3.0 | LP012 |
| | incision | | |
| HWHP HWHQ HWHR | Healing groin wound; 7.5 hours post | pCMVSport 3.0 | LP012 |
| | incision | | |
| HARM | Healing groin wound - zero hr post- | pCMVSport 3.0 | LP012 |
| | incision (control) | | |
| HBIM | Olfactory epithelium; nasalcavity | pCMVSport 3.0 | LP012 |
| HWDA | Healing Abdomen wound; 70&90 min | pCMVSport 3.0 | LP012 |
| | post incision | | |
| HWEA | Healing Abdomen Wound; 15 days post | pCMVSport 3.0 | LP012 |
| | incision | | |
| HWJA | Healing Abdomen Wound; 21&29 days | pCMVSport 3.0 | LP012 |
| HNAL | Human Tongue, frac 2 | pSport 1 | LP012 |
| HMJA | H. Meniingima, M6 | pSport 1 | LP012 |
| HMKA HMKB HMKC HMKD HMKE | H. Meningima, M1 | pSport 1 | LP012 |
| HOFA | Ovarian Tumor I, OV5232 | pSport 1 | LP012 |
| HCFA HCFB HCFC HCFD | T-Cell PHA 16 hrs | pSport 1 | LP012 |
| HCFL HCFM HCFN HCFO | T-Cell PHA 24 hrs | pSport 1 | LP012 |
| HMMA HMMB HMMC | Spleen metastic melanoma | pSport 1 | LP012 |
| HTDA | Human Tonsil, Lib 3 | pSport 1 | LP012 |
| HDBA | Human Fetal Thymus | pSport 1 | LP012 |
| HDUA | Pericardium | pSport 1 | LP012 |
| HBZA | Prostate, BPH, Lib 2 | pSport 1 | LP012 |
| HWCA | Larynx tumor | pSport 1 | LP012 |
| HWKA | Normal lung | pSport 1 | LP012 |
| HSMB | Bone marrow stroma, treated | pSport 1 | LP012 |
| HBHM | Normal trachea | pSport 1 | LP012 |
| HLFC | Human Larynx | pSport 1 | LP012 |
| HLRB | Siebben Polyposis | pSport 1 | LP012 |
| HNIA | Mammary Gland | pSport 1 | LP012 |
| HNJB | Palate carcinoma | pSport 1 | LP012 |
| HNKA | Palate normal | pSport 1 | LP012 |
| HMZA | Pharynx carcinoma | pSport 1 | LP012 |
| HABG | Cheek Carcinoma | pSport 1 | LP012 |
| HMZM | Pharynx Carcinoma | pSport 1 | LP012 |
| HDRM | Larynx Carcinoma | pSport 1 | LP012 |
| HVAA | Pancreas normal PCA4 No | pSport 1 | LP012 |
| HICA | Tongue carcinoma | pSport 1 | LP012 |
| HUKA HUKB HUKC HUKD HUKE | Human Uterine Cancer | Lambda ZAP II | LP013 |
| HFFA | Human Fetal Brain, random primed | Lambda ZAP II | LP013 |
| HTUA | Activated T-cell labeled with 4-thioluri | Lambda ZAP II | LP013 |
| HBQA | Early Stage Human Brain, random | Lambda ZAP II | LP013 |
| | primed | | |
| HMEB | Human microvascular Endothelial cells, | Lambda ZAP II | LP013 |
| | fract. B | | |
| HUSH | Human Umbilical Vein Endothelial | Lambda ZAP II | LP013 |
| | cells, fract. A, re-excision | | |
| HLQC HLQD | Hepatocellular tumor, re-excision | Lambda ZAP II | LP013 |
| HTWJ HTWK HTWL | Resting T-cell, re-excision | Lambda ZAP II | LP013 |
| HF6S | Human Whole 6 week Old Embryo (II), | pBluescript | LP013 |
| | subt | | |
| HHPS | Human Hippocampus, subtracted | pBluescript | LP013 |
| HL1S | LNCAP, differential expression | pBluescript | LP013 |
| HLHS HLHT | Early Stage Human Lung, Subtracted | pBluescript | LP013 |
| HSUS | Supt cells, cyclohexamide treated, | pBluescript | LP013 |
| | subtracted | | |
| HSUT | Supt cells, cyclohexamide treated, | pBluescript | LP013 |
| | differentially expressed | | |
| HSDS | H. Striatum Depression, subtracted | pBluescript | LP013 |
| HPTZ | Human Pituitary, Subtracted VII | pBluescript | LP013 |
| HSDX | H. Striatum Depression, subt II | pBluescript | LP013 |
| HSDZ | H. Striatum Depression, subt | pBluescript | LP013 |
| HPBA HPBB HPBC HPBD HPBE | Human Pineal Gland | pBluescript SK- | LP013 |
| HRTA | Colorectal Tumor | pBluescript SK- | LP013 |
| HSBA HSBB HSBC HSBM | HSC172 cells | pBluescript SK- | LP013 |
| HJAA HJAB HJAC HJAD | Jurkat T-cell G1 phase | pBluescript SK- | LP013 |
| HJBA HJBB HJBC HJBD | Jurkat T-cell, S1 phase | pBluescript SK- | LP013 |
| HTNA HTNB | Human Thyroid | pBluescript SK- | LP013 |
| HAHA HAHB | Human Adult Heart | Uni-ZAP XR | LP013 |
| HE6A | Whole 6 week Old Embryo | Uni-ZAP XR | LP013 |
| HFCA HFCB HFCC HFCD HFCE | Human Fetal Brain | Uni-ZAP XR | LP013 |
| HFKC HFKD HFKE HFKF HFKG | Human Fetal Kidney | Uni-ZAP XR | LP013 |
| HGBA HGBD HGBE HGBF HGBG | Human Gall Bladder | Uni-ZAP XR | LP013 |
| HPRA HPRB HPRC HPRD | Human Prostate | Uni-ZAP XR | LP013 |
| HTEA HTEB HTEC HTED HTEE | Human Testes | Uni-ZAP XR | LP013 |
| HTTA HTTB HTTC HTTD HTTE | Human Testes Tumor | Uni-ZAP XR | LP013 |
| HYBA HYBB | Human Fetal Bone | Uni-ZAP XR | LP013 |
| HFLA | Human Fetal Liver | Uni-ZAP XR | LP013 |
| HHFB HHFC HHFD HHFE HHFF | Human Fetal Heart | Uni-ZAP XR | LP013 |
| HUVB HUVC HUVD HUVE | Human Umbilical Vein, End. remake | Uni-ZAP XR | LP013 |
| HTHB HTHC HTHD | Human Thymus | Uni-ZAP XR | LP013 |
| HSTA HSTB HSTC HSTD | Human Skin Tumor | Uni-ZAP XR | LP013 |
| HTAA HTAB HTAC HTAD HTAE | Human Activated T-cells | Uni-ZAP XR | LP013 |
| HFEA HFEB HFEC | Human Fetal Epithelium (skin) | Uni-ZAP XR | LP013 |
| HJPA HJPB HJPC HJPD | Human Jurkat Membrane Bound | Uni-ZAP XR | LP013 |
| | Polysomes | | |
| HESA | Human Epithelioid Sarcoma | Uni-ZAP XR | LP013 |
| HALS | Human Adult Liver, Subtracted | Uni-ZAP XR | LP013 |
| HFTA HFTB HFTC HFTD | Human Fetal Dura Mater | Uni-ZAP XR | LP013 |
| HCAA HCAB HCAC | Cem cells, cyclohexamide treated | Uni-ZAP XR | LP013 |
| HRGA HRGB HRGC HRGD | Raji Cells, cyclohexamide treated | Uni-ZAP XR | LP013 |
| HE9A HE9B HE9C HE9D HE9E | Nine Week Old Early Stage Human | Uni-ZAP XR | LP013 |
| HSFA | Human Fibrosarcoma | Uni-ZAP XR | LP013 |
| HATA HATB HATC HATD HATE | Human Adrenal Gland Tumor | Uni-ZAP XR | LP013 |
| HTRA | Human Trachea Tumor | Uni-ZAP XR | LP013 |
| HE2A HE2D HE2E HE2H HE2I | 12 Week Old Early Stage Human | Uni-ZAP XR | LP013 |
| HE2B HE2C HE2F HE2G HE2P | 12 Week Old Early Stage Human, II | Uni-ZAP XR | LP013 |
| HNEA HNEB HNEC HNED HNEE | Human Neutrophil | Uni-ZAP XR | LP013 |
| HBGA | Human Primary Breast Cancer | Uni-ZAP XR | LP013 |
| HPTS HPTT HPTU | Human Pituitary, subtracted | Uni-ZAP XR | LP013 |
| HMQA HMQB HMQC HMQD | Human Activated Monocytes | Uni-ZAP XR | LP013 |
| HOAA HOAB HOAC | Human Osteosarcoma | Uni-ZAP XR | LP013 |
| HTOA HTOD HTOE HTOF HTOG | human tonsils | Uni-ZAP XR | LP013 |
| HMGB | Human OB MG63 control fraction I | Uni-ZAP XR | LP013 |
| HOPB | Human OB HOS control fraction I | Uni-ZAP XR | LP013 |
| HOQB | Human OB HOS treated (1 nM E2) | Uni-ZAP XR | LP013 |
| | fraction I | | |
| HAUA HAUB HAUC | Amniotic Cells - TNF induced | Uni-ZAP XR | LP013 |
| HAQA HAQB HAQC HAQD | Amniotic Cells - Primary Culture | Uni-ZAP XR | LP013 |
| HROA HROC | HUMAN STOMACH | Uni-ZAP XR | LP013 |
| HBJA HBJB HBJC HBJD HBJE | HUMAN B CELL LYMPHOMA | Uni-ZAP XR | LP013 |
| HODA HODB HODC HODD | human ovarian cancer | Uni-ZAP XR | LP013 |
| HCPA | Corpus Callosum | Uni-ZAP XR | LP013 |
| HSOA | stomach cancer (human) | Uni-ZAP XR | LP013 |
| HERA | SKIN | Uni-ZAP XR | LP013 |
| HMDA | Brain-medulloblastoma | Uni-ZAP XR | LP013 |
| HGLA HGLB HGLD | Glioblastoma | Uni-ZAP XR | LP013 |
| HWTA HWTB HWTC | wilm's tumor | Uni-ZAP XR | LP013 |
| HEAA | H. Atrophic Endometrium | Uni-ZAP XR | LP013 |
| HAPN HAPO HAPP HAPQ HAPR | Human Adult Pulmonary; re-excision | Uni-ZAP XR | LP013 |
| HLTG HLTH | Human T-cell lymphoma; re-excision | Uni-ZAP XR | LP013 |
| HAHC HAHD HAHE | Human Adult Heart; re-excision | Uni-ZAP XR | LP013 |
| HAGA HAGB HAGC HAGD HAGE | Human Amygdala | Uni-ZAP XR | LP013 |
| HSJA HSJB HSJC | Smooth muscle-ILb induced | Uni-ZAP XR | LP013 |
| HSHA HSHB HSHC | Smooth muscle, IL1b induced | Uni-ZAP XR | LP013 |
| HPWA HPWB HPWC HPWD HPWE | Prostate BPH | Uni-ZAP XR | LP013 |
| HPIA HPIB HPIC | LNCAP prostate cell line | Uni-ZAP XR | LP013 |
| HPJA HPJB HPJC | PC3 Prostate cell line | Uni-ZAP XR | LP013 |
| HBTA | Bone Marrow Stroma, TNF&LPS ind | Uni-ZAP XR | LP013 |
| HMCF HMCG HMCH HMCI HMCJ | Macrophage-oxLDL; re-excision | Uni-ZAP XR | LP013 |
| HAGG HAGH HAGI | Human Amygdala; re-excision | Uni-ZAP XR | LP013 |
| HACA | H. Adipose Tissue | Uni-ZAP XR | LP013 |
| HKFB | K562 + PMA (36 hrs), re-excision | ZAP Express | LP013 |
| HCWT HCWU HCWV | CD34 positive cells (cord blood), re-ex | ZAP Express | LP013 |
| HBWA | Whole brain | ZAP Express | LP013 |
| HBXA HBXB HBXC HBXD | Human Whole Brain #2 - Oligo dT > | ZAP Express | LP013 |
| | 1.5 Kb | | |
| HAVM | Temporal cortex-Alzheizmer | pT-Adv | LP014 |
| HAVT | Hippocampus, Alzheimer Subtracted | pT-Adv | LP014 |
| HHAS | CHME Cell Line | Uni-ZAP XR | LP014 |
| HAJR | Larynx normal | pSport 1 | LP014 |
| HWLE HWLF HWLG HWLH | Colon Normal | pSport 1 | LP014 |
| HCRM HCRN HCRO | Colon Carcinoma | pSport 1 | LP014 |
| HWLI HWLJ HWLK | Colon Normal | pSport 1 | LP014 |
| HWLQ HWLR HWLS HWLT | Colon Tumor | pSport I | LP014 |
| HBFM | Gastrocnemius Muscle | pSport 1 | LP014 |
| HBOD HBOE | Quadriceps Muscle | pSport 1 | LP014 |
| HBKD HBKE | Soleus Muscle | pSport 1 | LP014 |
| HCCM | Pancreatic Langerhans | pSport 1 | LP014 |
| HWGA | Larynx carcinoma | pSport 1 | LP014 |
| HWGM HWGN | Larynx carcinoma | pSport 1 | LP014 |
| HWLA HWLB HWLC | Normal colon | pSport 1 | LP014 |
| HWLM HWLN | Colon Tumor | pSport 1 | LP014 |
| HVAM HVAN HVAO | Pancreas Tumor | pSport 1 | LP014 |
| HWGQ | Larynx carcinoma | pSport 1 | LP014 |
| HAQM HAQN | Salivary Gland | pSport 1 | LP014 |
| HASM | Stomach; normal | pSport 1 | LP014 |
| HBCM | Uterus; normal | pSport 1 | LP014 |
| HCDM | Testis; normal | pSport 1 | LP014 |
| HDJM | Brain; normal | pSport 1 | LP014 |
| HEFM | Adrenal Gland, normal | pSport 1 | LP014 |
| HBAA | Rectum normal | pSport 1 | LP014 |
| HFDM | Rectum tumour | pSport 1 | LP014 |
| HGAM | Colon, normal | pSport 1 | LP014 |
| HHMM | Colon, tumour | pSport 1 | LP014 |
| HCLB HCLC | Human Lung Cancer | Lambda Zap II | LP015 |
| HRLA | L1 Cell line | ZAP Express | LP015 |
| HHAM | Hypothalamus, Alzheimer's | pCMVSport 3.0 | LP015 |
| HKBA | Ku 812F Basophils Line | pSport 1 | LP015 |
| HS2S | Saos2, Dexamethosome Treated | pSport 1 | LP016 |
| HA5A | Lung Carcinoma A549 TNFalpha | pSport 1 | LP016 |
| | activated | | |
| HTFM | TF-1 Cell Line GM-CSF Treated | pSport 1 | LP016 |
| HYAS | Thyroid Tumour | pSport 1 | LP016 |
| HUTS | Larynx Normal | pSport 1 | LP016 |
| HXOA | Larynx Tumor | pSport 1 | LP016 |
| HEAH | Ea.hy.926 cell line | pSport 1 | LP016 |
| HINA | Adenocarcinoma Human | pSport 1 | LP016 |
| HRMA | Lung Mesothelium | pSport 1 | LP016 |
| HLCL | Human Pre-Differentiated Adipocytes | Uni-Zap XR | LP017 |
| HS2A | Saos2 Cells | pSport 1 | LP020 |
| HS2I | Saos2 Cells; Vitamin D3 Treated | pSport 1 | LP020 |
| HUCM | CHME Cell Line, untreated | pSport 1 | LP020 |
| HEPN | Aryepiglottis Normal | pSport 1 | LP020 |
| HPSN | Sinus Piniformis Tumour | pSport 1 | LP020 |
| HNSA | Stomach Normal | pSport 1 | LP020 |
| HNSM | Stomach Tumour | pSport 1 | LP020 |
| HNLA | Liver Normal Met5No | pSport 1 | LP020 |
| HUTA | Liver Tumour Met 5 Tu | pSport 1 | LP020 |
| HOCN | Colon Normal | pSport 1 | LP020 |
| HOCT | Colon Tumor | pSport 1 | LP020 |
| HTNT | Tongue Tumour | pSport 1 | LP020 |
| HLXN | Larynx Normal | pSport 1 | LP020 |
| HLXT | Larynx Tumour | pSport 1 | LP020 |
| HTYN | Thymus | pSport 1 | LP020 |
| HPLN | Placenta | pSport 1 | LP020 |
| HTNG | Tongue Normal | pSport 1 | LP020 |
| HZAA | Thyroid Normal (SDCA2 No) | pSport 1 | LP020 |
| HWES | Thyroid Thyroiditis | pSport 1 | LP020 |
| HFHD | Ficolled Human Stromal Cells, 5Fu | pTrip1Ex2 | LP021 |
| | treated | | |
| HFHM, HFHN | Ficolled Human Stromal Cells, | pTrip1Ex2 | LP021 |
| | Untreated | | |
| HPCI | Hep G2 Cells, lambda library | lambda Zap-CMV XR | LP021 |
| HBCA, HBCB, HBCC | H. Lymph node breast Cancer | Uni-ZAP XR | LP021 |
| HCOK | Chondrocytes | pSPORT1 | LP022 |
| HDCA, HDCB, HDCC | Dendritic Cells From CD34 Cells | pSPORT 1 | LP022 |
| HDMA, HDMB | CD40 activated monocyte dendritic | pSPORT 1 | LP022 |
| | cells | | |
| HDDM, HDDN, HDDO | LPS activated derived dendritic cells | pSPORT 1 | LP022 |
| HPCR | Hep G2 Cells, PCR library | lambda Zap-CMV XR | LP022 |
| HAAA, HAAB, HAAC | Lung, Cancer (4005313A3): Invasive | pSPORT 1 | LP022 |
| | Poorly Differentiated Lung | | |
| | Adenocarcinoma | | |
| HIPA, HIPB, HIPC | Lung, Cancer (4005163 B7): Invasive, | pSPORT 1 | LP022 |
| | Poorly Diff. Adenocarcinoma, | | |
| | Metastatic | | |
| HOOH, HOOI | Ovary, Cancer: (4004562 B6) Papillary | pSPORT 1 | LP022 |
| | Serous Cystic Neoplasm, Low | | |
| | Malignant Pot | | |
| HIDA | Lung, Normal: (4005313 B1) | pSPORT 1 | LP022 |
| HUJA, HUJB, HUJC, HUJD, HUJE | B-Cells | pCMVSport 3.0 | LP022 |
| HNOA, HNOB, HNOC, HNOD | Ovary, Normal: (9805C040R) | pSPORT 1 | LP022 |
| HNLM | Lung, Normal: (4005313 B1) | pSPORT 1 | LP022 |
| HSCL | Stromal Cells | pSPORT 1 | LP022 |
| HAAX | Lung, Cancer: (4005313 A3) Invasive | pSPORT 1 | LP022 |
| | Poorly-differentiated Metastatic lung | | |
| | adenocarcinoma | | |
| HUUA, HUUB, HUUC, HUUD | B-cells (unstimulated) | pTrip1Ex2 | LP022 |
| HWWA, HWWB, HWWC, HWWD, HW | B-cells (stimulated) | pSPORT 1 | LP022 |
| WE, HWWF, HWWG | | | |
| HCCC | Colon, Cancer: (9808C064R) | pCMVSport 3.0 | LP023 |
| HPDO HPDP HPDQ HPDR HPD | Ovary, Cancer (9809C332): Poorly | pSport 1 | LP023 |
| | differentiated adenocarcinoma | | |
| HPCO HPCP HPCQ HPCT | Ovary, Cancer (15395A1F): Grade II | pSport 1 | LP023 |
| | Papillary Carcinoma | | |
| HOCM HOCO HOCP HOCQ | Ovary, Cancer: (15799A1F) Poorly | pSport 1 | LP023 |
| | differentiated carcinoma | | |
| HCBM HCBN HCBO | Breast, Cancer: (4004943 A5) | pSport 1 | LP023 |
| HNBT HNBU HNBV | Breast, Normal: (4005522B2) | pSport 1 | LP023 |
| HBCP HBCQ | Breast, Cancer: (4005522 A2) | pSport 1 | LP023 |
| HBCJ | Breast, Cancer: (9806C012R) | pSport 1 | LP023 |
| HSAM HSAN | Stromal cells 3.88 | pSport 1 | LP023 |
| HVCA HVCB HVCC HVCD | Ovary, Cancer: (4004332 A2) | pSport 1 | LP023 |
| HSCK HSEN HSEO | Stromal cells (HBM3.18) | pSport 1 | LP023 |
| HSCP HSCQ | stromal cell clone 2.5 | pSport 1 | LP023 |
| HUXA | Breast Cancer: (4005385 A2) | pSport 1 | LP023 |
| HCOM HCON HCOO HCOP HCOQ | Ovary, Cancer (4004650 A3): Well- | pSport 1 | LP023 |
| | Differentiated Micropapillary Serous | | |
| | Carcinoma | | |
| HBNM | Breast, Cancer: (9802C020E) | pSport 1 | LP023 |
| HVVA HVVB HVVC HVVD HVVE | Human Bone Marrow, treated | pSport 1 | LP023 |

[0932] Two nonlimiting examples are provided below for isolating a particular clone from the deposited sample of plasmid cDNAs cited for that clone in Table 7. First, a plasmid is directly isolated by screening the clones using a polynucleotide probe corresponding to the nucleotide sequence of SEQ ID NO:X.

[0933] Particularly, a specific polynucleotide with 30-40 nucleotides is synthesized using an Applied Biosystems DNA synthesizer according to the sequence reported. The oligonucleotide is labeled, for instance, with ³²P-γ-ATP using T4 polynucleotide kinase and purified according to routine methods. (E.g., Maniatis et al., Molecular Cloning: A Laboratory Manual, Cold Spring Harbor Press, Cold Spring, N.Y. (1982).) The plasmid mixture is transformed into a suitable host, as indicated above (such as XL-1 Blue (Stratagene)) using techniques known to those of skill in the art, such as those provided by the vector supplier or in related publications or patents cited above. The transformants are plated on 1.5% agar plates (containing the appropriate selection agent, e.g., ampicillin) to a density of about 150 transformants (colonies) per plate. These plates are screened using Nylon membranes according to routine methods for bacterial colony screening (e.g., Sambrook et al., Molecular Cloning: A Laboratory Manual, 2nd Edit., (1989), Cold Spring Harbor Laboratory Press, pages 1.93 to 1.104), or other techniques known to those of skill in the art.

[0934] Alternatively, two primers of 17-20 nucleotides derived from both ends of the nucleotide sequence of SEQ ID NO:X are synthesized and used to amplify the desired cDNA using the deposited cDNA plasmid as a template. The polymerase chain reaction is carried out under routine conditions, for instance, in 25 μl of reaction mixture with 0.5 ug of the above cDNA template. A convenient reaction mixture is 1.5-5 mM MgCl₂, 0.01% (w/v) gelatin, 20 μM each of dATP, dCTP, dGTP, dTTP, 25 pmol of each primer and 0.25 Unit of Taq polymerase. Thirty five cycles of PCR (denaturation at 94° C. for 1 min; annealing at 55° C. for 1 min; elongation at 72° C. for 1 min) are performed with a Perkin-Elmer Cetus automated thermal cycler. The amplified product is analyzed by agarose gel electrophoresis and the DNA band with expected molecular weight is excised and purified. The PCR product is verified to be the selected sequence by subcloning and sequencing the DNA product.

[0935] Several methods are available for the identification of the 5′ or 3′ non-coding portions of a gene which may not be present in the deposited clone. These methods include but are not limited to, filter probing, clone enrichment using specific probes, and protocols similar or identical to 5′ and 3′ “RACE” protocols which are well known in the art. For instance, a method similar to 5′ RACE is available for generating the missing 5′ end of a desired full-length transcript. (Fromont-Racine et al., Nucleic Acids Res. 21(7):1683-1684 (1993).)

[0936] Briefly, a specific RNA oligonucleotide is ligated to the 5′ ends of a population of RNA presumably containing full-length gene RNA transcripts. A primer set containing a primer specific to the ligated RNA oligonucleotide and a primer specific to a known sequence of the gene of interest is used to PCR amplify the 5′ portion of the desired full-length gene. This amplified product may then be sequenced and used to generate the full length gene.

[0937] This above method starts with total RNA isolated from the desired source, although poly-A+ RNA can be used. The RNA preparation can then be treated with phosphatase if necessary to eliminate 5′ phosphate groups on degraded or damaged RNA which may interfere with the later RNA ligase step. The phosphatase should then be inactivated and the RNA treated with tobacco acid pyrophosphatase in order to remove the cap structure present at the 5′ ends of messenger RNAs. This reaction leaves a 5′ phosphate group at the 5′ end of the cap cleaved RNA which can then be ligated to an RNA oligonucleotide using T4 RNA ligase.

[0938] This modified RNA preparation is used as a template for first strand cDNA synthesis using a gene specific oligonucleotide. The first strand synthesis reaction is used as a template for PCR amplification of the desired 5′ end using a primer specific to the ligated RNA oligonucleotide and a primer specific to the known sequence of the gene of interest. The resultant product is then sequenced and analyzed to confirm that the 5′ end sequence belongs to the desired gene.

### Example 2

### Isolation of Genomic Clones Corresponding to a Polynucleotide

[0939] A human genomic P1 library (Genomic Systems, Inc.) is screened by PCR using primers selected for the sequence corresponding to SEQ ID NO:X according to the method described in Example 1. (See also, Sambrook et al., Molecular Cloning: A Laboratory Manual, 2nd Edn., (1989), Cold Spring Harbor Laboratory Press).

### Example 3

### Tissue Specific Expression Analysis

[0940] The Human Genome Sciences, Inc. (HGS) database is derived from sequencing tissue and/or disease specific cDNA libraries. Libraries generated from a particular tissue are selected and the specific tissue expression pattern of EST groups or assembled contigs within these libraries is determined by comparison of the expression patterns of those groups or contigs within the entire database. ESTs and assembled contigs which show tissue specific expression are selected.

[0941] The original clone from which the specific EST sequence was generated, or in the case of an assembled contig, the clone from which the 5′ most EST sequence was generated, is obtained from the catalogued library of clones. and the insert amplified by PCR using methods known in the art. The PCR product is denatured and then transferred in 96 or 384 well format to a nylon membrane (Schleicher and Scheull) generating an array filter of tissue specific clones. Housekeeping genes, maize genes, and known tissue specific genes are included on the filters. These targets can be used in signal normalization and to validate assay sensitivity. Additional targets are included to monitor probe length and specificity of hybridization.

[0942] Radioactively labeled hybridization probes are generated by first strand cDNA synthesis per the manufacturer's instructions (Life Technologies) from mRNA/RNA samples prepared from the specific tissue being analyzed (e.g., endocrine system tissues, cancers of endocrine system tissue, prostate, prostate cancer, ovarian, ovarian cancer, etc.). The hybridization probes are purified by gel exclusion chromatography, quantitated, and hybridized with the array filters in hybridization bottles at 65° C. overnight. The filters are washed under stringent conditions and signals are captured using a Fuji phosphorimager.

[0943] Data is extracted using AIS software and following background subtraction, signal normalization is performed. This includes a normalization of filter-wide expression levels between different experimental runs. Genes that are differentially expressed in the tissue of interest are identified.

### Example 4

### Chromosomal Mapping of the Polynucleotides

[0944] An oligonucleotide primer set is designed according to the sequence at the 5′ end of SEQ ID NO:X. This primer preferably spans about 100 nucleotides. This primer set is then used in a polymerase chain reaction under the following set of conditions: 30 seconds, 95° C.; 1 minute, 56° C.; 1 minute, 70° C. This cycle is repeated 32 times followed by one 5 minute cycle at 70° C. Human, mouse, and hamster DNA is used as template in addition to a somatic cell hybrid panel containing individual chromosomes or chromosome fragments (Bios, Inc). The reactions are analyzed on either 8% polyacrylamide gels or 3.5% agarose gels. Chromosome mapping is determined by the presence of an approximately 100 bp PCR fragment in the particular somatic cell hybrid.

### Example 5

### Bacterial Expression of a Polypeptide

[0945] A polynucleotide encoding a polypeptide of the present invention is amplified using PCR oligonucleotide primers corresponding to the 5′ and 3′ ends of the DNA sequence, as outlined in Example 1, to synthesize insertion fragments. The primers used to amplify the cDNA insert should preferably contain restriction sites, such as BamHI and XbaI, at the 5′ end of the primers in order to clone the amplified product into the expression vector. For example, BamHI and XbaI correspond to the restriction enzyme sites on the bacterial expression vector pQE-9. (Qiagen, Inc., Chatsworth, Calif.). This plasmid vector encodes antibiotic resistance (Ampr), a bacterial origin of replication (ori), an IPTG-regulatable promoter/operator (P/O), a ribosome binding site (RBS), a 6-histidine tag (6-His), and restriction enzyme cloning sites.

[0946] The pQE-9 vector is digested with BamHI and XbaI and the amplified fragment is ligated into the pQE-9 vector maintaining the reading frame initiated at the bacterial RBS. The ligation mixture is then used to transform the E. coli strain M15/rep4 (Qiagen, Inc.) which contains multiple copies of the plasmid pREP4, which expresses the lacI repressor and also confers kanamycin resistance (Kan^{r}). Transformants are identified by their ability to grow on LB plates and ampicillin/kanamycin resistant colonies are selected. Plasmid DNA is isolated and confirmed by restriction analysis.

[0947] Clones containing the desired constructs are grown overnight (O/N) in liquid culture in LB media supplemented with both Amp (100 ug/ml) and Kan (25 ug/ml). The O/N culture is used to inoculate a large culture at a ratio of 1:100 to 1:250. The cells are grown to an optical density 600 (O.D.⁶⁰⁰) of between 0.4 and 0.6. IPTG (Isopropyl-B-D-thiogalacto pyranoside) is then added to a final concentration of 1 mM. IPTG induces by inactivating the lacI repressor, clearing the P/O leading to increased gene expression.

[0948] Cells are grown for an extra 3 to 4 hours. Cells are then harvested by centrifugation (20 mins at 6000×g). The cell pellet is solubilized in the chaotropic agent 6 Molar Guanidine HCl by stirring for 3-4 hours at 4° C. The cell debris is removed by centrifugation, and the supernatant containing the polypeptide is loaded onto a nickel-nitrilo-tri-acetic acid (“Ni-NTA”) affinity resin column (available from QIAGEN, Inc., supra). Proteins with a 6×His tag bind to the Ni-NTA resin with high affinity and can be purified in a simple one-step procedure (for details see: The QIAexpressionist (1995) QIAGEN, Inc., supra).

[0949] Briefly, the supernatant is loaded onto the column in 6 M guanidine-HCl, pH 8. The column is first washed with 10 volumes of 6 M guanidine-HCl, pH 8, then washed with 10 volumes of 6 M guanidine-HCl pH 6, and finally the polypeptide is eluted with 6 M guanidine-HCl, pH 5.

[0950] The purified protein is. then renatured by dialyzing it against phosphate-buffered saline (PBS) or 50 mM Na-acetate, pH 6 buffer plus 200 mM NaCl. Alternatively, the protein can be successfully refolded while immobilized on the Ni-NTA column. The recommended conditions are as follows: renature using a linear 6M-1M urea gradient in 500 mM NaCl, 20% glycerol, 20 mM Tris/HCl pH 7.4, containing protease inhibitors. The renaturation should be performed over a period of 1.5 hours or more. After renaturation the proteins are eluted by the addition of 250 mM immidazole. Immidazole is removed by a final dialyzing step against PBS or 50 mM sodium acetate pH 6 buffer plus 200 mM NaCl. The purified protein is stored at 4° C. or frozen at −80° C.

[0951] In addition to the above expression vector, the present invention further includes an expression vector, called pHE4a (ATCC Accession Number 209645, deposited on Feb. 25, 1998) which contains phage operator and promoter elements operatively linked to a polynucleotide of the present invention. This vector contains: 1) a neomycinphosphotransferase gene as a selection marker, 2) an E. coli origin of replication, 3) a T5 phage promoter sequence, 4) two lac operator sequences, 5) a Shine-Delgarno sequence, and 6) the lactose operon repressor gene (lacIq). The origin of replication (oriC) is derived from pUC19 (LTI, Gaithersburg, Md.). The promoter and operator sequences are made synthetically.

[0952] DNA can be inserted into the pHE4a by restricting the vector with NdeI and XbaI, BamHI, XhoI, or Asp718, running the restricted product on a gel, and isolating the larger fragment (the stuffer fragment should be about 310 base pairs). The DNA insert is generated according to the PCR protocol described in Example 1, using PCR primers having restriction sites for NdeI (5′ primer) and XbaI, BamHI, XhoI, or Asp718 (3′ primer). The PCR insert is gel purified and restricted with compatible enzymes. The insert and vector are ligated according to standard protocols.

[0953] The engineered vector could easily be substituted in the above protocol to express protein in a bacterial system.

### Example 6

### Purification of a Polypeptide from an Inclusion Body

[0954] The following alternative method can be used to purify a polypeptide expressed in E coli when it is present in the form of inclusion bodies. Unless otherwise specified, all of the following steps are conducted at 4-10C.

[0955] Upon completion of the production phase of the E. coli fermentation, the cell culture is cooled to 4-10° C. and the cells harvested by continuous centrifugation at 15,000 rpm (Heraeus Sepatech). On the basis of the expected yield of protein per unit weight of cell paste and the amount of purified protein required, an appropriate amount of cell paste, by weight, is suspended in a buffer solution containing 100 mM Tris, 50 mM EDTA, pH 7.4. The cells are dispersed to a homogeneous suspension using a high shear mixer.

[0956] The cells are then lysed by passing the solution through a microfluidizer (Microfuidics, Corp. or APV Gaulin, Inc.) twice at 4000-6000 psi. The homogenate is then mixed with NaCl solution to a final concentration of 0.5 M NaCl, followed by centrifugation at 7000×g for 15 min. The resultant pellet is washed again using 0.5M NaCl, 100 mM Tris, 50 mM EDTA, pH 7.4.

[0957] The resulting washed inclusion bodies are solubilized with 1.5 M guanidine hydrochloride (GuHCl) for 2-4 hours. After 7000×g centrifugation for 15 min., the pellet is discarded and the polypeptide containing supernatant is incubated at 4° C. overnight to allow further GuHCl extraction.

[0958] Following high speed centrifugation (30,000×g) to remove insoluble particles, the GuHCl solubilized protein is refolded by quickly mixing the GuHCl extract with 20 volumes of buffer containing 50 mM sodium, pH 4.5, 150 mM NaCl, 2 mM EDTA by vigorous stirring. The refolded diluted protein solution is kept at 4° C. without mixing for 12 hours prior to further purification steps.

[0959] To clarify the refolded polypeptide solution, a previously prepared tangential filtration unit equipped with 0.16 μm membrane filter with appropriate surface area (e.g., Filtron), equilibrated with 40 mM sodium acetate, pH 6.0 is employed. The filtered sample is loaded onto a cation exchange resin (e.g., Poros HS-50, Perseptive Biosystems). The column is washed with 40 mM sodium acetate, pH 6.0 and eluted with 250 mM, 500 mM, 1000 mM, and 1500 mM NaCl in the same buffer, in a stepwise manner. The absorbance at 280 nm of the effluent is continuously monitored. Fractions are collected and further analyzed by SDS-PAGE.

[0960] Fractions containing the polypeptide are then pooled and mixed with 4 volumes of water. The diluted sample is then loaded onto a previously prepared set of tandem columns of strong anion (Poros HQ-50, Perseptive Biosystems) and weak anion (Poros CM-20, Perseptive Biosystems) exchange resins. The columns are equilibrated with 40 mM sodium acetate, pH 6.0. Both columns are washed with 40 mM sodium acetate, pH 6.0, 200 mM NaCl. The CM-20 column is then eluted using a 10 column volume linear gradient ranging from 0.2 M NaCl, 50 mM sodium acetate, pH 6.0 to 1.0 M NaCl, 50 mM sodium acetate, pH 6.5. Fractions are collected under constant A280 monitoring of the effluent. Fractions containing the polypeptide (determined, for instance, by 16% SDS-PAGE) are then pooled.

[0961] The resultant polypeptide should exhibit greater than 95% purity after the above refolding and purification steps. No major contaminant bands should be observed from Commassie blue stained 16% SDS-PAGE gel when 5 μg of purified protein is loaded. The purified protein can also be tested for endotoxin/LPS contamination, and typically the LPS content is less than 0.1 ng/ml according to LAL assays.

### Example 7

### Cloning and Expression of a Polypeptide in a Baculovirus Expression System

[0962] In this example, the plasmid shuttle vector pA2 is used to insert a polynucleotide into a baculovirus to express a polypeptide. This expression vector contains the strong polyhedrin promoter of the Autographa californica nuclear polyhedrosis virus (AcMNPV) followed by convenient restriction sites such as BamHI, Xba I and Asp718. The polyadenylation site of the simian virus 40 (“SV40”) is used for efficient polyadenylation. For easy selection of recombinant virus, the plasmid contains the beta-galactosidase gene from E. coli under control of a weak Drosophila promoter in the same orientation, followed by the polyadenylation signal of the polyhedrin gene. The inserted genes are flanked on both sides by viral sequences for cell-mediated homologous recombination with wild-type viral DNA to generate a viable virus that express the cloned polynucleotide.

[0963] Many other baculovirus vectors can be used in place of the vector above, such as pAc373, pVL941, and pAcIM1, as one skilled in the art would readily appreciate, as long as the construct provides appropriately located signals for transcription, translation, secretion and the like, including a signal peptide and an in-frame AUG as required. Such vectors are described, for instance, in Luckow et al., Virology 170:31-39 (1989).

[0964] Specifically, the cDNA sequence contained in the deposited clone, including the AUG initiation codon, is amplified using the PCR protocol described in Example 1. If a naturally occurring signal sequence is used to produce the polypeptide of the present invention, the pA2 vector does not need a second signal peptide. Alternatively, the vector can be modified (pA2 GP) to include a baculovirus leader sequence, using the standard methods described in Summers et al., “A Manual of Methods for Baculovirus Vectors and Insect Cell Culture Procedures,” Texas Agricultural Experimental Station Bulletin No. 1555 (1987).

[0965] The amplified fragment is isolated from a 1% agarose gel using a commercially available kit (“Geneclean,” BIO 101 Inc., La Jolla, Calif.). The fragment then is digested with appropriate restriction enzymes and again purified on a 1% agarose gel.

[0966] The plasmid is digested with the corresponding restriction enzymes and optionally, can be dephosphorylated using calf intestinal phosphatase, using routine procedures known in the art. The DNA is then isolated from a 1% agarose gel using a commercially available kit (“Geneclean” B 101 Inc., La Jolla, Calif.).

[0967] The fragment and the dephosphorylated plasmid are ligated together with T4 DNA ligase. E. coli HB101 or other suitable E. coli hosts such as XL-1 Blue (Stratagene Cloning Systems, La Jolla, Calif.) cells are transformed with the ligation mixture and spread on culture plates. Bacteria containing the plasmid are identified by digesting DNA from individual colonies and analyzing the digestion product by gel electrophoresis. The sequence of the cloned fragment is confirmed by DNA sequencing.

[0968] Five μg of a plasmid containing the polynucleotide is co-transfected with 1.0 μg of a commercially available linearized baculovirus DNA (“BaculoGold™ baculovirus DNA”, Pharmingen, San Diego, Calif.), using the lipofection method described by Feigner et al., Proc. Natl. Acad. Sci. USA 84:7413-7417 (1987). One μg of BaculoGold™ virus DNA and 5 μg of the plasmid are mixed in a sterile well of a microtiter plate containing 50 μl of serum-free Grace's medium (Life Technologies Inc., Gaithersburg, Md.). Afterwards, 10 μl Lipofectin plus 90 μl Grace's medium are added, mixed and incubated for 15 minutes at room temperature. Then the transfection mixture is added drop-wise to Sf9 insect cells (ATCC CRL 1711) seeded in a 35 mm tissue culture plate with 1 ml Grace's medium without serum. The plate is then incubated for 5 hours at 27° C. The transfection solution is then removed from the plate and 1 ml of Grace's insect medium supplemented with 10% fetal calf serum is added. Cultivation is then continued at 27° C. for four days.

[0969] After four days the supernatant is collected and a plaque assay is performed, as described by Summers and Smith, supra. An agarose gel with “Blue Gal” (Life Technologies Inc., Gaithersburg) is used to allow easy identification and isolation of gal-expressing clones, which produce blue-stained plaques. (A detailed description of a “plaque assay” of this type can also be found in the user's guide for insect cell culture and baculovirology distributed by Life Technologies Inc., Gaithersburg, page 9-10.) After appropriate incubation, blue stained plaques are picked with the tip of a micropipettor (e.g., Eppendorf). The agar containing the recombinant viruses is then resuspended in a microcentrifuge tube containing 200 μl of Grace's medium and the suspension containing the recombinant baculovirus is used to infect Sf9 cells seeded in 35 mm dishes. Four days later the supernatants of these culture dishes are harvested and then they are stored at 4° C.

[0970] To verify the expression of the polypeptide, Sf9 cells are grown in Grace's medium supplemented with 10% heat-inactivated FBS. The cells are infected with the recombinant baculovirus containing the polynucleotide at a multiplicity of infection (“MOI”) of about 2. If radiolabeled proteins are desired, 6 hours later the medium is removed and is replaced with SF900 II medium minus methionine and cysteine (available from Life Technologies Inc., Rockville, Md.). After 42 hours, 5 μCi of 35S-methionine and 5 μCi ³⁵S-cysteine (available from Amersham) are added. The cells are further incubated for 16 hours and then are harvested by centrifugation. The proteins in the supernatant as well as the intracellular proteins are analyzed by SDS-PAGE followed by autoradiography (if radiolabeled).

[0971] Microsequencing of the amino acid sequence of the amino terminus of purified protein may be used to determine the amino terminal sequence of the produced protein.

### Example 8

### Expression of a Polypeptide in Mammalian Cells

[0972] The polypeptide of the present invention can be expressed in a mammalian cell. A typical mammalian expression vector contains a promoter element, which mediates the initiation of transcription of mRNA, a protein coding sequence, and signals required for the termination of transcription and polyadenylation of the transcript. Additional elements include enhancers, Kozak sequences and intervening sequences flanked by donor and acceptor sites for RNA splicing. Highly efficient transcription is achieved with the early and late promoters from SV40, the long terminal repeats (LTRs) from Retroviruses, e.g., RSV, HTLVI, HIVI and the early promoter of the cytomegalovirus (CMV). However, cellular elements can also be used (e.g., the human actin promoter).

[0973] Suitable expression vectors for use in practicing the present invention include, for example, vectors such as pSVL and pMSG (Pharmacia, Uppsala, Sweden), pRSVcat (ATCC 37152), pSV2dhfr (ATCC 37146), pBC12MI (ATCC 67109), pCMVSport 2.0, and pCMVSport 3.0. Mammalian host cells that could be used include, human Hela, 293, H9 and Jurkat cells, mouse NIH3T3 and C127 cells, Cos 1, Cos 7 and CV1, quail QC1-3 cells, mouse L cells and Chinese hamster ovary (CHO) cells.

[0974] Alternatively, the polypeptide can be expressed in stable cell lines containing the polynucleotide integrated into a chromosome. The co-transfection with a selectable marker such as DHFR, gpt, neomycin, or hygromycin allows the identification and isolation of the transfected cells.

[0975] The transfected gene can also be amplified to express large amounts of the encoded protein. The DHFR (dihydrofolate reductase) marker is useful in developing cell lines that carry several hundred or even several thousand copies of the gene of interest. (See, e.g., Alt, F. W., et al., J. Biol. Chem. 253:1357-1370 (1978); Hamlin, J. L. and Ma, C., Biochem. et Biophys. Acta, 1097:107-143 (1990); Page, M. J. and Sydenham, M. A., Biotechnology 9:64-68 (1991).) Another useful selection marker is the enzyme glutamine synthase (GS) (Murphy et al., Biochem J. 227:277-279 (1991); Bebbington et al., Bio/Technology 10:169-175 (1992). Using these markers, the mammalian cells are grown in selective medium and the cells with the highest resistance are selected. These cell lines contain the amplified gene(s) integrated into a chromosome. Chinese hamster ovary (CHO) and NSO cells are often used for the production of proteins.

[0976] Derivatives of the plasmid pSV2-dhfr (ATCC Accession No. 37146), the expression vectors pC4 (ATCC Accession No. 209646) and pC6 (ATCC Accession No.209647) contain the strong promoter (LTR) of the Rous Sarcoma Virus (Cullen et al., Molecular and Cellular Biology, 438-447 (March, 1985)) plus a fragment of the CMV-enhancer (Boshart et al., Cell 41:521-530 (1985).) Multiple cloning sites, e.g., with the restriction enzyme cleavage sites BamHI, XbaI and Asp718, facilitate the cloning of the gene of interest. The vectors also contain the 3′ intron, the polyadenylation and termination signal of the rat preproinsulin gene, and the mouse DHFR gene under control of the SV40 early promoter.

[0977] Specifically, the plasmid pC6, for example, is digested with appropriate restriction enzymes and then dephosphorylated using calf intestinal phosphates by procedures known in the art. The vector is then isolated from a 1% agarose gel.

[0978] A polynucleotide of the present invention is amplified according to the protocol outlined in Example 1. If a naturally occurring signal sequence is used to produce the polypeptide of the present invention, the vector does not need a second signal peptide. Alternatively, if a naturally occurring signal sequence is not used, the vector can be modified to include a heterologous signal sequence. (See, e.g., International Publication No. WO 96/34891.)

[0979] The amplified fragment is isolated from a 1% agarose gel using a commercially available kit (“Geneclean,” BIO 101 Inc., La Jolla, Calif.). The fragment then is digested with appropriate restriction enzymes and again purified on a 1% agarose gel.

[0980] The amplified fragment is then digested with the same restriction enzyme and purified on a 1% agarose gel. The isolated fragment and the dephosphorylated vector are then ligated with T4 DNA ligase. E. coli HB101 or XL-1 Blue cells are then transformed and bacteria are identified that contain the fragment inserted into plasmid pC6 using, for instance, restriction enzyme analysis.

[0981] Chinese hamster ovary cells lacking an active DHFR gene is used for transfection. Five μg of the expression plasmid pC6 or pC4 is cotransfected with 0.5 μg of the plasmid pSVneo using lipofectin.(Felgner et al., supra). The plasmid pSV2-neo contains a dominant selectable marker, the neo gene from Tn5 encoding an enzyme that confers resistance to a group of antibiotics including G418. The cells are seeded in alpha minus MEM supplemented with 1 mg/ml G418. After 2 days, the cells are trypsinized and seeded in hybridoma cloning plates (Greiner, Germany) in alpha minus MEM supplemented with 10, 25, or 50 ng/ml of methotrexate plus 1 mg/ml G418. After about 10-14 days single clones are trypsinized and then seeded in 6-well petri dishes or 10 ml flasks using different concentrations of methotrexate (50 nM, 100 nM, 200 nM, 400 nM, 800 nM). Clones growing at the highest concentrations of methotrexate are then transferred to new 6-well plates containing even higher concentrations of methotrexate (1 μM, 2 μM, 5 μM, 10 mM, 20 mM). The same procedure is repeated until clones are obtained which grow at a concentration of 100-200 μM. Expression of the desired gene product is analyzed, for instance, by SDS-PAGE and Western blot or by reversed phase HPLC analysis.

### Example 9

### Protein Fusions

[0982] The polypeptides of the present invention are preferably fused to other proteins. These fusion proteins can be used for a variety of applications. For example, fusion of the present polypeptides to His-tag, HA-tag, protein A, IgG domains, and maltose binding protein facilitates-purification. (See Example 5; see also EP A 394,827; Traunecker, et al., Nature 331:84-86 (1988).) Similarly, fusion to IgG-1, IgG-3, and albumin increases the halflife time in vivo. Nuclear localization signals fused to the polypeptides of the present invention can target the protein to a specific subcellular localization, while covalent heterodimer or homodimers can increase or decrease the activity of a fusion protein. Fusion proteins can also create chimeric molecules having more than one function. Finally, fusion proteins can increase solubility and/or stability of the fused protein compared to the non-fused protein. All of the types of fusion proteins described above can be made by modifying the following protocol, which outlines the fusion of a polypeptide to an IgG molecule, or the protocol described in Example 5.

[0983] Briefly, the human Fc portion of the IgG molecule can be PCR amplified, using primers that span the 5′ and 3′ ends of the sequence described below. These primers also should have convenient restriction enzyme sites that will facilitate cloning into an expression vector, preferably a mammalian expression vector.

[0984] For example, if pC4 (ATCC Accession No. 209646) is used, the human Fc portion can be ligated into the BamHI cloning site. Note that the 3′ BamHI site should be destroyed. Next, the vector containing the human Fc portion is re-restricted with BamHI, linearizing the vector, and a polynucleotide of the present invention, isolated by the PCR protocol described in Example 1, is ligated into this BamHI site. Note that the polynucleotide is cloned without a stop codon, otherwise a fusion protein will not be produced.

[0985] If the naturally occurring signal sequence is used to produce the polypeptide of the present invention, pC4 does not need a second signal peptide. Alternatively, if the naturally occurring signal sequence is not used, the vector can be modified to include a heterologous signal sequence. (See, e.g., International Publication No. WO 96/34891.)

Human LgG Fc region:

(SEQ ID NO:1)

GGGATCCGGAGCCCAAATCTTCTGACAAAACTCACACATGCCCACCGTGC
CCAGCACCTGAATTCGAGGGTGCACCGTCAGTCTTCCTCTTCCCCCCAAA
ACCCAAGGACACCCTCATGATCTCCCGGACTCCTGAGGTCACATGCGTGG
TGGTGGACGTAAGCCACGAAGACCCTGAGGTCAAGTTCAACTGGTACGTG
GACGGCGTGGAGGTGCATAATGCCAAGACAAAGCCGCGGGAGGAGCAGTA
CAACAGCACGTACCGTGTGGTCAGCGTCCTCACCGTCCTGCACCAGGACT
GGCTGAATGGCAAGGAGTACXAGTGCAAGGTCTCCAACAAAGCCCTCCCA
ACCCCCATCGAGAAAACCATCTCCAAAGCCAAAGGGCAGCCCCGAGAACC
ACAGGTGTACACCCTGCCCCCATCCCGGGATGAGCTGACCAAGAACCAGG
TCAGCCTGACCTGCCTGGTCAAAGGCTTCTATCCAAGCGACATCGCCGTG
GAGTGGGAGAGCAATGGGCAGCCGGAGAACAACTACAAGACCACGCCTCC
CGTGCTGGACTCCGACGGCTCCTTCTTCCTCTACAGCAAGCTCACCGTGG
ACAAGAGCAGGTGGCAGCAGGGGAACGTCTTCTCATGCTCCGTGATGCAT
GAGGCTCTGCACAACCACTACACGCAGAAGAGCCTCTCCCTGTCTCCGGG
TAAATGAGTGCGACGGCCGCGACTCTAGAGGAT

### Example 10

### Production of an Antibody from a Polypeptide

[0986] Hybridoma Technology

[0987] The antibodies of the present invention can be prepared by a variety of methods. (See, Current Protocols, Chapter 2.) As one example of such methods, cells expressing polypeptide of the present invention are administered to an animal to induce the production of sera containing polyclonal antibodies. In a preferred method, a preparation of polypeptide of the present invention is prepared and purified to render it substantially free of natural contaminants. Such a preparation is then introduced into an animal in order to produce polyclonal antisera of greater specific activity.

[0988] Monoclonal antibodies specific for polypeptide of the present invention are prepared using hybridoma technology (Kohler et al., Nature 256:495 (1975); Kohler et al., Eur. J. Immunol. 6:511 (1976); Kohler et al., Eur. J. Immunol. 6:292 (1976); Hammerling et al., in: Monoclonal Antibodies and T-Cell Hybridomas, Elsevier, N.Y., pp. 563-681 (1981)). In general, an animal (preferably a mouse) is immunized with polypeptide of the present invention or, more preferably, with a secreted polypeptide of the present invention-expressing cell. Such polypeptide-expressing cells are cultured in any suitable tissue culture medium, preferably in Earle's modified Eagle's medium supplemented with 10% fetal bovine serum (inactivated at about 56° C.), and supplemented with about 10 g/l of nonessential amino acids, about 1,000 U/ml of penicillin, and about 100 μg/ml of streptomycin.

[0989] The splenocytes of such mice are extracted and fused with a suitable myeloma cell line. Any suitable myeloma cell line may be employed in accordance with the present invention; however, it is preferable to employ the parent myeloma cell line (SP2O), available from the ATCC. After fusion, the resulting hybridoma cells are selectively maintained in HAT medium, and then cloned by limiting dilution as described by Wands et al. (Gastroenterology 80:225-232 (1981)). The hybridoma cells obtained through such a selection are then assayed to identify clones which secrete antibodies capable of binding the polypeptide of the present invention.

[0990] Alternatively, additional antibodies capable of binding to polypeptide of the present invention can be produced in a two-step procedure using anti-idiotypic antibodies. Such a method makes use of the fact that antibodies are themselves antigens, and therefore, it is possible to obtain an antibody which binds to a second antibody. In accordance with this method, protein specific antibodies are used to immunize an animal, preferably a mouse. The splenocytes of such an animal are then used to produce hybridoma cells, and the hybridoma cells are screened to identify clones which produce an antibody whose ability to bind to the polypeptide of the present invention-specific antibody can be blocked by polypeptide of the present invention. Such antibodies comprise anti-idiotypic antibodies to the polypeptide of the present invention-specific antibody and are used to immunize an animal to induce formation of further polypeptide of the present invention-specific antibodies.

[0991] For in vivo use of antibodies in humans, an antibody is “humanized”. Such antibodies can be produced using genetic constructs derived from hybridoma cells producing the monoclonal antibodies described above. Methods for producing chimeric and humanized antibodies are known in the art and are discussed herein. (See, for review, Morrison, Science 229:1202 (1985); Oi et al., BioTechniques 4:214 (1986); Cabilly et al., U.S. Pat. No. 4,816,567; Taniguchi et al., EP 171496; Morrison et al., EP 173494; Neuberger et al., WO 8601533; Robinson et al., International Publication No. WO 8702671; Boulianne et al., Nature 312:643 (1984); Neuberger et al., Nature 314:268 (1985).)

[0992] Isolation of Antibody Fragments Directed Against Polypeptide of the Present Invention from a Library of scFvs

[0993] Naturally occurring V-genes isolated from human PBLs are constructed into a library of antibody fragments which contain reactivities against polypeptide of the present invention to which the donor may or may not have been exposed (see e.g., U.S. Pat. No. 5,885,793 incorporated herein by reference in its entirety).

[0994] Rescue of the Library. A library of scFvs is constructed from the RNA of human PBLs as described in International Publication No. WO 92/01047. To rescue phage displaying antibody fragments, approximately −−10⁹ E. coli harboring the phagemid are used to inoculate 50 ml of 2×TY containing 1% glucose and 100 μg/ml of ampicillin (2×TY-AMP-GLU) and grown to an O.D. of 0.8 with shaking. Five ml of this culture is used to inoculate 50 ml of 2×TY-AMP-GLU, 2×108 TU of delta gene 3 helper (M13 delta gene III, see International Publication No. WO 92/01047) are added and the culture incubated at 37° C. for 45 minutes without shaking and then at 37° C. for 45 minutes with shaking. The culture is centrifuged at 4000 r.p.m. for 10 min. and the pellet resuspended in 2 liters of 2×TY containing 100 μg/ml ampicillin and 50 ug/ml kanamycin and grown overnight. Phage are prepared as described in International Application No. WO 92/01047.

[0995] M13 delta gene III is prepared as follows: M13 delta gene III helper phage does not encode gene III protein, hence the phage(mid) displaying antibody fragments have a greater avidity of binding to antigen. Infectious M13 delta gene III particles are made by growing the helper phage in cells harboring a pUC19 derivative supplying the wild type gene III protein during phage morphogenesis. The culture is incubated for 1 hour at 37° C. without shaking and then for a further hour at 37° C. with shaking. Cells are spun down (IEC-Centra 8,400 r.p.m. for 10 min), resuspended in 300 ml 2×TY broth containing 100 μg ampicillin/ml and 25 μg kanamycin/ml (2×TY-AMP-KAN) and grown overnight, shaking at 37° C. Phage particles are purified and concentrated from the culture medium by two PEG-precipitations (Sambrook et al., 1990), resuspended in 2 ml PBS and passed through a 0.45 μm filter (Minisart NML; Sartorius) to give a final concentration of approximately 10¹³ transducing units/ml (ampicillin-resistant clones).

[0996] Panning of the Library. Immunotubes (Nunc) are coated overnight in PBS with 4 ml of either 100 μg/ml or 10 μg/ml of a polypeptide of the present invention. Tubes are blocked with 2% Marvel-PBS for 2 hours at 37° C. and then washed 3 times in PBS. Approximately 10¹³ TU of phage is applied to the tube and incubated for 30 minutes at room temperature tumbling on an over and under turntable and then left to stand for another 1.5 hours. Tubes are washed 10 times with PBS 0.1% Tween-20 and 10 times with PBS. Phage are eluted by adding 1 ml of 100 mM triethylamine and rotating 15 minutes on an under and over turntable after which the solution is immediately neutralized with 0.5 ml of 1.0M Tris-HCl, pH 7.4. Phage are then used to infect 10 ml of mid-log E. coli TG1 by incubating eluted phage with bacteria for 30 minutes at 37° C. The E. coli are then plated on TYE plates containing 1% glucose and 100 μg/ml ampicillin. The resulting bacterial library is then rescued with delta gene 3 helper phage as described above to prepare phage for a subsequent round of selection. This process is then repeated for a total of 4 rounds of affinity purification with tube-washing increased to 20 times with PBS, 0.1% Tween-20 and 20 times with PBS for rounds 3 and 4.

[0997] Characterization of Binders. Eluted phage from the 3rd and 4th rounds of selection are used to infect E. coli HB 2151 and soluble scFv is produced (Marks, et al., 1991) from single colonies for assay. ELISAs are performed with microtitre plates coated with 10 pg/ml of the polypeptide of the present invention in 50 mM bicarbonate pH 9.6. Clones positive in ELISA are further characterized by PCR fingerprinting (see, e.g., International Application No. WO 92/01047) and then by sequencing. These ELISA positive clones may also be further characterized by techniques known in the art, such as, for example, epitope mapping, binding affinity, receptor signal transduction, ability to block or competitively inhibit antibody/antigen binding, and competitive agonistic or antagonistic activity.

### Example 11

### Method of Determining Alterations in a Gene Corresponding to a Polynucleotide

[0998] RNA isolated from entire families or individual patients presenting with a phenotype of interest (such as a disease) is isolated. cDNA is then generated from these RNA samples using protocols known in the art. (See, Sambrook.) The cDNA is then used as a template for PCR, employing primers surrounding regions of interest in SEQ ID NO:X; and/or the nucleotide sequence of the cDNA contained in Clone ID NO:Z. Suggested PCR conditions consist of 35 cycles at 95 degrees C. for 30 seconds; 60-120 seconds at 52-58 degrees C.; and 60-120 seconds at 70 degrees C., using buffer solutions described in Sidransky et al., Science 252:706 (1991).

[0999] PCR products are then sequenced using primers labeled at their 5′ end with T4 polynucleotide kinase, employing SequiTherm Polymerase (Epicentre Technologies). The intron-exon boundaries of selected exons is also determined and genomic PCR products analyzed to confirm the results. PCR products harboring suspected mutations are then cloned and sequenced to validate the results of the direct sequencing.

[1000] PCR products are cloned into T-tailed vectors as described in Holton et al., Nucleic Acids Research, 19:1156 (1991) and sequenced with T7 polymerase (United States Biochemical). Affected individuals are identified by mutations not present in unaffected individuals.

[1001] Genomic rearrangements are also observed as a method of determining alterations in a gene corresponding to a polynucleotide. Genomic clones isolated according to Example 2 are nick-translated with digoxigenindeoxy-uridine 5′-triphosphate (Boehringer Manheim), and FISH performed as described in Johnson et al., Methods Cell Biol. 35:73-99 (1991). Hybridization with the labeled probe is carried out using a vast excess of human cot-1 DNA for specific hybridization to the corresponding genomic locus.

[1002] Chromosomes are counterstained with 4,6-diamino-2-phenylidole and propidium iodide, producing a combination of C- and R-bands. Aligned images for precise mapping are obtained using a triple-band filter set (Chroma Technology, Brattleboro, Vt.) in combination with a cooled charge-coupled device camera (Photometrics, Tucson, Ariz.) and variable excitation wavelength filters. (Johnson et al., Genet. Anal. Tech. Appl., 8:75 (1991,).) Image collection, analysis and chromosomal fractional length measurements are performed using the ISee Graphical Program System. (Inovision. Corporation, Durham, N.C.) Chromosome alterations of the genomic region hybridized by the probe are identified as insertions, deletions, and translocations. These alterations are used as a diagnostic marker for an associated disease.

### Example 12

### Method of Detecting Abnormal Levels of a Polypeptide in a Biological Sample

[1003] A polypeptide of the present invention can be detected in a biological sample, and if an increased or decreased level of the polypeptide is detected, this polypeptide is a marker for a particular phenotype. Methods of detection are numerous, and thus, it is understood that one skilled in the art can modify the following assay to fit their particular needs.

[1004] For example, antibody-sandwich ELISAs are used to detect polypeptides in a sample, preferably a biological sample. Wells of a microtiter plate are coated with specific antibodies, at a final concentration of 0.2 to 10 ug/ml. The antibodies are either monoclonal or polyclonal and are produced by the method described in Example 10. The wells are blocked so that non-specific binding of the polypeptide to the well is reduced.

[1005] The coated wells are then incubated for >2 hours at RT with a sample containing the polypeptide. Preferably, serial dilutions of the sample should be used to validate results. The plates are then washed three times with deionized or distilled water to remove unbound polypeptide.

[1006] Next, 50 ul of specific antibody-alkaline phosphatase conjugate, at a concentration of 25-400 ng, is added and incubated for 2 hours at room temperature. The plates are again washed three times with deionized or distilled water to remove unbound conjugate.

[1007] Add 75 ul of 4-methylumbelliferyl phosphate (MUP) or p-nitrophenyl phosphate (NPP) substrate solution to each well and incubate 1 hour at room temperature. Measure the reaction by a microtiter plate reader. Prepare a standard curve, using serial dilutions of a control sample, and plot polypeptide concentration on the X-axis (log scale) and fluorescence or absorbance of the Y-axis (linear scale). Interpolate the concentration of the polypeptide in the sample using the standard curve.

### Example 13

### Formulation

[1008] The invention also provides methods of treatment and/or prevention of diseases or disorders (such as, for example, any one or more of the diseases or disorders disclosed herein) by administration to a subject of an effective amount of a Therapeutic. By therapeutic is meant polynucleotides or polypeptides of the invention (including fragments and variants), agonists or antagonists thereof, and/or antibodies thereto, in combination with a pharmaceutically acceptable carrier type (e.g., a sterile carrier).

[1009] The Therapeutic will be formulated and dosed in a fashion consistent with good medical practice, taking into account the clinical condition of the individual patient (especially the side effects of treatment with the Therapeutic alone), the site of delivery, the method of administration, the scheduling of administration, and other factors known to practitioners. The “effective amount” for purposes herein is thus determined by such considerations.

[1010] As a general proposition, the total pharmaceutically effective amount of the Therapeutic administered parenterally per dose will be in the range of about 1 ug/kg/day to 10 mg/kg/day of patient body weight, although, as noted above, this will be subject to therapeutic discretion. More preferably, this dose is at least 0.01 mg/kg/day, and most preferably for humans between about 0.01 and 1 mg/kg/day for the hormone. If given continuously, the Therapeutic is typically administered at a dose rate of about 1 ug/kg/hour to about 50 ug/kg/hour, either by 1-4 injections per day or by continuous subcutaneous infusions, for example, using a mini-pump. An intravenous bag solution may also be employed. The length of treatment needed to observe changes and the interval following treatment for responses to occur appears to vary depending on the desired effect.

[1011] Therapeutics can be are administered orally, rectally, parenterally, intracistemally, intravaginally, intraperitoneally, topically (as by powders, ointments, gels, drops or transdermal patch), bucally, or as an oral or nasal spray. “Pharmaceutically acceptable carrier” refers to a non-toxic solid, semisolid or liquid filler, diluent, encapsulating material or formulation auxiliary of any. The term “parenteral” as used herein refers to modes of administration which include intravenous, intramuscular, intraperitoneal, intrasternal, subcutaneous and intraarticular injection and infusion.

[1012] Therapeutics of the invention are also suitably administered by sustained-release systems. Suitable examples of sustained-release Therapeutics are administered orally, rectally, parenterally, intracistemally, intravaginally, intraperitoneally, topically (as by powders, ointments, gels, drops or transdermal patch), bucally, or as an oral or nasel spray. “Pharmaceutically acceptable carrier” refers to a non-toxic solid, semisolid or liquid filler, diluent, encapsulating material or formulation auxiliary of any type. The term “parenteral” as used herein refers to modes of administration which include intravenous, intramuscular, intraperitoneal, intrasternal, subcutaneous and intraarticular injection and infusion.

[1013] Therapeutics of the invention are also suitably administered by sustained-release systems. Suitable examples of sustained-release Therapeutics include suitable polymeric materials (such as, for example, semi-permeable polymer matrices in the form of shaped articles, e.g., films, or mirocapsules), suitable hydrophobic materials (for example as an emulsion in an acceptable oil) or ion exchange resins, and sparingly soluble derivatives (such as, for example, a sparingly soluble salt).

[1014] Sustained-release matrices include polylactides (U.S. Pat. No. 3,773,919, EP 58,481), copolymers of L-glutamic acid and gamma-ethyl-L-glutamate (Sidman et at., Biopolymers 22:547-556 (1983)), poly (2-hydroxyethyl methacrylate) (Langer et al., J. Biomed. Mater. Res. 15:167-277 (1981), and Langer, Chem. Tech. 12:98-105 (1982)), ethylene vinyl acetate (Langer et al., Id.) or poly-D-(−)-3-hydroxybutyric acid (EP 133,988).

[1015] Sustained-release Therapeutics also include liposomally entrapped Therapeutics of the invention (see generally, Langer, Science 249:1527-1533 (1990); Treat et al., in Liposomes in the Therapy of Infectious Disease and Cancer, Lopez-Berestein and Fidler (eds.), Liss, New York, pp. 317-327 and 353-365 (1989)). Liposomes containing the Therapeutic are prepared by methods known per se: DE 3,218,121; Epstein et al., Proc. Natl. Acad. Sci. (USA) 82:3688-3692 (1985); Hwang et al., Proc. Natl. Acad. Sci.(USA) 77:4030-4034 (1980); EP 52,322; EP 36,676; EP 88,046; EP 143,949; EP 142,641; Japanese Pat. Appl. 83-118008; U.S. Pat. Nos. 4,485,045 and 4,544,545; and EP 102,324. Ordinarily, the liposomes are of the small (about 200-800 Angstroms) unilamellar type in which the lipid content is greater than about 30 mol. percent cholesterol, the selected proportion being adjusted for the optimal Therapeutic.

[1016] In yet an additional embodiment, the Therapeutics of the invention are delivered by way of a pump (see Langer, supra; Sefton, CRC Crit. Ref. Biomed. Eng. 14:201 (1987); Buchwald et al., Surgery 88:507 (1980); Saudek et al., N. Engl. J. Med. 321:574 (1989)).

[1017] Other controlled release systems are discussed in the review by Langer (Science 249:1527-1533 (1990)).

[1018] For parenteral administration, in one embodiment, the Therapeutic is formulated generally by mixing it at the desired degree of purity, in a unit dosage injectable form (solution, suspension, or emulsion), with a pharmaceutically acceptable carrier, i.e., one that is non-toxic to recipients at the dosages and concentrations employed and is compatible with other ingredients of the formulation. For example, the formulation preferably does not include oxidizing agents and other compounds that are known to be deleterious to the Therapeutic.

[1019] Generally, the formulations are prepared by contacting the Therapeutic uniformly and intimately with liquid carriers or finely divided solid carriers or both. Then, if necessary, the product is shaped into the desired formulation. Preferably the carrier is a parenteral carrier, more preferably a solution that is isotonic with the blood of the recipient. Examples of such carrier vehicles include water, saline, Ringer's solution, and dextrose solution. Non-aqueous vehicles such as fixed oils and ethyl oleate are also useful herein, as well as liposomes.

[1020] The carrier suitably contains minor amounts of additives such as substances that enhance isotonicity and chemical stability. Such materials are non-toxic to recipients at the dosages and concentrations employed, and include buffers such as phosphate, citrate, succinate, acetic acid, and other organic acids or their salts; antioxidants such as ascorbic acid; low molecular weight (less than about ten residues) polypeptides, e.g., polyarginine or tripeptides; proteins, such as serum albumin, gelatin, or immunoglobulins; hydrophilic polymers' such as polyvinylpyrrolidone; amino acids, such as glycine, glutamic acid, aspartic acid, or arginine; monosaccharides, disaccharides, and other carbohydrates including cellulose or its derivatives, glucose, manose, or dextrins; chelating agents such as EDTA; sugar alcohols such as mannitol or sorbitol; counterions such as sodium; and/or nonionic surfactants such as polysorbates, poloxamers, or PEG.

[1021] The Therapeutic is typically formulated in such vehicles at a concentration of about 0.1 mg/ml to 100 mg/ml, preferably 1-10 mg/ml, at a pH of about 3 to 8. It will be understood that the use of certain of the foregoing excipients, carriers, or stabilizers will result in the formation of polypeptide salts.

[1022] Any pharmaceutical used for therapeutic administration can be sterile. Sterility is readily accomplished by filtration through sterile filtration membranes (e.g., 0.2 micron membranes). Therapeutics generally are placed into a container having a sterile access port, for example, an intravenous solution bag or vial having a stopper pierceable by a hypodermic injection needle.

[1023] Therapeutics ordinarily will be stored in unit or multi-dose containers, for example, sealed ampoules or vials, as an aqueous solution or as a lyophilized formulation for reconstitution. As an example of a lyophilized formulation, 10-ml vials are filled with 5 ml of sterile-filtered 1% (w/v) aqueous Therapeutic solution, and the resulting mixture is lyophilized. The infusion solution is prepared by reconstituting the lyophilized Therapeutic using bacteriostatic Water-for-Injection.

[1024] The invention also provides a pharmaceutical pack or kit comprising one or more containers filled with one or more of the ingredients of the Therapeutics of the invention. Associated with such container(s) can be a notice in the form prescribed by a governmental agency regulating the manufacture, use or sale of pharmaceuticals or biological products, which notice reflects approval by the agency of manufacture, use or sale for human administration. In addition, the Therapeutics may be employed in conjunction with other therapeutic compounds.

[1025] The Therapeutics of the invention may be administered alone or in combination with adjuvants. Adjuvants that may be administered with the Therapeutics of the invention include, but are not limited to, alum, alum plus deoxycholate (ImmunoAg), MTP-PE (Biocine Corp.), QS21 (Genentech, Inc.), BCG (e.g., THERACYS®), MPL and nonviable prepartions of Corynebacterium parvum. In a specific embodiment, Therapeutics of the invention are administered in combination with alum. In another specific embodiment, Therapeutics of the invention are administered in combination with QS-21. Further adjuvants that may be administered with the Therapeutics of the invention include, but are not limited to, Monophosphoryl lipid immunomodulator, AdjuVax 100a, QS-21, QS-18, CRL1005, Aluminum salts, MF-59, and Virosomal adjuvant technology. Vaccines that may be administered with the Therapeutics of the invention include, but are not limited to, vaccines directed toward protection against MMR (measles, mumps, rubella), polio, varicella, tetanus/diptheria, hepatitis A, hepatitis B, haemophilus influenzae B, whooping cough, pneumonia, influenza, Lyme's Disease, rotavirus, cholera, yellow fever, Japanese encephalitis, poliomyelitis, rabies, typhoid fever, and pertussis. Combinations may be administered either concomitantly, e.g., as an admixture, separately but simultaneously or concurrently; or sequentially. This includes presentations in which the combined agents are administered together as a therapeutic mixture, and also procedures in which the combined agents are administered separately but simultaneously, e.g., as through separate intravenous lines into the same individual. Administration “in combination” further includes the separate administration of one of the compounds or agents given first, followed by the second.

[1026] The Therapeutics of the invention may be administered alone or in combination with other therapeutic agents. Therapeutic agents that may be administered in combination with the Therapeutics of the invention, include but not limited to, chemotherapeutic agents, antibiotics, steroidal and non-steroidal anti-inflammatories, conventional immunotherapeutic agents, and/or therapeutic treatments described below. Combinations may be administered either concomitantly, e.g., as an admixture, separately but simultaneously or concurrently; or sequentially. This includes presentations in which the combined agents are administered together as a therapeutic mixture, and also procedures in which the combined agents are administered separately but simultaneously, e.g., as through separate intravenous lines into the same individual. Administration “in combination” further includes the separate administration of one of the compounds or agents given first, followed by the second.

[1027] In certain embodiments, Therapeutics of the invention are administered in combination with antiretroviral agents, nucleoside/nucleotide reverse transcriptase inhibitors (NRTIs), non-nucleoside reverse transcriptase inhibitors (NNRTIs), and/or protease inhibitors (PIs). NRTIs that may be administered in combination with the Therapeutics of the invention, include, but are not limited to, RETROVIR™ (zidovudine/AZT), VIDEX™ (didanosine/ddi), HIVID™ (zalcitabine/ddC), ZERIT™ (stavudine/d4T), EPIVIR™ (lamivudine/3TC), and COMBIVIR™ (zidovudine/lamivudine). NNRTIs that may be administered in combination with the Therapeutics of the invention, include, but are not limited to, VIRAMUNE™ (nevirapine), RESCRIPTOR™ (delavirdine), and SUSTIVA™ (efavirenz). Protease inhibitors that may be administered in combination with the Therapeutics of the invention, include, but are not limited to, CRIXIVAN™ (indinavir), NORVIR™ (ritonavir), INVIRASE™ (saquinavir), and VIRACEPT™ (nelfinavir). In a specific embodiment, antiretroviral agents, nucleoside reverse transcriptase inhibitors, non-nucleoside reverse transcriptase inhibitors, and/or protease inhibitors may be used in any combination with Therapeutics of the invention to treat AIDS and/or to prevent or treat HIV infection.

[1028] Additional NRTIs include LODENOSINE™ (F-ddA; an acid-stable adenosine NRTI; Triangle/Abbott; COVIRACIL™ (emtricitabine/FTC; structurally related to lamivudine (3TC) but with 3- to 10-fold greater activity in vitro; Triangle/Abbott); dOTC (BCH-10652, also structurally related to lamivudine but retains activity against a substantial proportion of lamivudine-resistant isolates; Biochem Pharma); Adefovir (refused approval for anti-HIV therapy by FDA; Gilead Sciences); PREVEON® (Adefovir Dipivoxil, the active prodrug of adefovir; its active form is PMEA-pp); TENOFOVIR™ (bis-POC PMPA, a PMPA prodrug; Gilead); DAPD/DXG (active metabolite of DAPD; Triangle/Abbott); D-D4FC (related to 3TC, with activity against AZT/3TC-resistant virus); GW420867X (Glaxo Wellcome); ZIAGEN™ (abacavir/159U89; Glaxo Wellcome Inc.); CS-87 (3′azido-2′,3′-dideoxyuridine; WO 99/66936); and S-acyl-2-thioethyl (SATE)-bearing prodrug forms of β-L-FD4C and β-L-FddC (WO 98/17281).

[1029] Additional NNRTIs include COACTINON™ (Emivirine/MKC-442, potent NNRTI of the HEPT class; Triangle/Abbott); CAPRAVIRINE™ (AG-1549/S-1153, a next generation NNRTI with activity against viruses containing the K103N mutation; Agouron); PNU-142721 (has 20- to 50-fold greater activity than its predecessor delavirdine and is active against K103N mutants; Pharmacia & Upjohn); DPC-961 and DPC-963 (second-generation derivatives of efavirenz, designed to be active against viruses with the K103N mutation; DuPont); GW-420867×(has 25-fold greater activity than HBY097 and is active against K103N mutants; Glaxo Wellcome); CALANOLIDE A (naturally occurring agent from the latex tree; active against viruses containing either or both the Y181C and K103N mutations); and Propolis (WO 99/49830).

[1030] Additional protease inhibitors include LOPINAVIR™ (ABT378/r; Abbott Laboratories); BMS-232632 (an azapeptide; Bristol-Myres Squibb); TIPRANAVIR™ (PNU-140690, a non-peptic dihydropyrone; Pharmacia & Upjohn); PD-178390 (a nonpeptidic dihydropyrone; Parke-Davis); BMS 232632 (an azapeptide; Bristol-Myers Squibb); L-756,423 (an indinavir analog; Merck); DMP-450 (a cyclic urea compound; Avid & DuPont); AG-1776 (a peptidomimetic with in vitro activity against protease inhibitor-resistant viruses; Agouron); VX-175/GW-433908 (phosphate prodrug of amprenavir; Vertex & Glaxo Welcome); CGP61755 (Ciba); and AGENERASE™ (amprenavir; Glaxo Wellcome Inc.).

[1031] Additional antiretroviral agents include fusion inhibitors/gp41 binders. Fusion inhibitors/gp41 binders include T-20 (a peptide from residues 643-678 of the HIV gp41 transmembrane protein ectodomain which binds to gp41 in its resting state and prevents transformation to the fusogenic state; Trimeris) and T-1249 (a second-generation fusion inhibitor; Trimeris).

[1032] Additional antiretroviral agents include fusion inhibitors/chemokine receptor antagonists. Fusion inhibitors/chemokine receptor antagonists include CXCR4 antagonists such as AND 3100 (a bicyclam), SDF-1 and its analogs, and ALX40-4C (a cationic peptide), T22 (an 18 amino acid peptide; Trimeris) and the T22 analogs T134 and T140; CCR5 antagonists such as RANTES (9-68), AOP-RANTES, NNY-RANTES, and TAK-779; and CCR5/CXCR4 antagonists such as NSC 651016 (a distamycin analog). Also included are CCR2B, CCR3, and CCR6 antagonists. Chemokine recpetor agonists such as RANTES, SDF-1, MIP-1α, MIP-1β, etc., may inhibit fusion.

[1033] Additional antiretroviral agents include integrase inhibitors. Integrase inhibitors include dicaffeoylquinic (DFQA) acids; L-chicoric acid (a dicaffeoyltartaric (DCTA) acid); quinalizarin (QLC) and related anthraquinones; ZINTEVIR™ (AR 177, an oligonucleotide that probably acts at cell surface rather than being a true integrase inhibitor; Arondex); and naphthols such as those disclosed in WO 98/50347.

[1034] Additional antiretroviral agents include hydroxyurea-like compunds such as BCX-34 (a purine nucleoside phosphorylase inhibitor; Biocryst); ribonucleotide reductase inhibitors such as DIDOX™ (Molecules for Health); inosine monophosphate dehydrogenase (IMPDH) inhibitors sucha as VX-497 (Vertex); and myvopholic acids such as CellCept (mycophenolate mofetil; Roche).

[1035] Additional antiretroviral agents include inhibitors of viral integrase, inhibitors of viral genome nuclear translocation such as arylene bis(methylketone) compounds; inhibitors of HIV entry such as AOP-RANTES, NNY-RANTES, RANTES-IgG fusion protein, soluble complexes of RANTES and glycosaminoglycans (GAG), and AMD-3100; nucleocapsid zinc finger inhibitors such as dithiane compounds; targets of HIV Tat and Rev; and pharmacoenhancers such as ABT-378.

[1036] Other antiretroviral therapies and adjunct therapies include cytokines and lymphokines such as MIP-1α, MIP-1β, SDF-1α, IL-2, PROLEUKIN™ (aldesleukin/L2-7001; Chiron), 1 L-4, IL-10, IL-12, and IL-13; interferons such as IFN-α2a; antagonists of TNFs, NFKB, GM-CSF, M-CSF, and IL-10; agents that modulate immune activation such as cyclosporin and prednisone; vaccines such as Remune” (HIV Immunogen), APL 400-003 (Apollon), recombinant gp120 and fragments, bivalent (B/E) recombinant envelope glycoprotein, rgp120CM235, MN rgp120, SF-2 rgp120, gp120/soluble CD4 complex, Delta JR-FL protein, branched synthetic peptide derived from discontinuous gp120 C3/C4 domain, fusion-competent immunogens, and Gag, Pol, Nef, and Tat vaccines; gene-based therapies such as genetic suppressor elements (GSEs; WO 98/54366), and intrakines (genetically modified CC chemokines targetted to the ER to block surface expression of newly synthesized CCR5 (Yang et al., PNAS 94:11567-72 (1997); Chen et al., Nat. Med. 3:1110-16 (1997)); antibodies such as the anti-CXCR4 antibody 12G5, the anti-CCR5 antibodies 2D7, 5C7, PA8, PA9, PA10, PA11, PA12, and PA14, the anti-CD4 antibodies Q4120 and RPA-T4, the anti-CCR3 antibody 7B 11, the anti-gp120 antibodies 17b, 48d, 447-52D, 257-D, 268-D and 50.1, anti-Tat antibodies, anti-TNF-α antibodies, and monoclonal antibody 33A; aryl hydrocarbon (AH) receptor agonists and antagonists such as TCDD, 3,3′,4,4′,5-pentachlorobiphenyl, 3,3′,4,4′-tetrachlorobiphenyl, and α-naphthoflavone (WO 98/30213); and antioxidants such as γ-L-glutamyl-L-cysteine ethyl ester (γ-GCE; WO 99/56764).

[1037] In a further embodiment, the Therapeutics of the invention are administered in combination with an antiviral agent. Antiviral agents that may be administered with the Therapeutics of the invention include, but are not limited to, acyclovir, ribavirin, amantadine, and remantidine.

[1038] In other embodiments, Therapeutics of the invention may be administered in combination with anti-opportunistic infection agents. Anti-opportunistic agents that may be administered. in combination with the Therapeutics of the invention, include, but are not limited to, TRIMETHOPRIM-SULFAMETHOXAZOLE™, DAPSONE™, PENTAMIDINE™, ATOVAQUONE™, ISONIAZID™, RIFAMPIN™, PYRAZINAMIDE™, ETHAMBUTOL™, RIFABUTIN™, CLARITHROMYCIN™, AZITHROMYCIN™, GANCICLOVIR™, FOSCARNET™, CIDOFOVIR™, FLUCONAZOLE™, ITRACONAZOLE™, KETOCONAZOLE™, ACYCLOVIR™, FAMCICOLVIR™, PYRIMETHAMINE™, LEUCOVORIN™, NEUPOGEN™ (filgrastim/G-CSF), and LEUKINE™ (sargramostim/GM-CSF). In a specific embodiment, Therapeutics of the invention are used in any combination with TRIMETHOPRIM-SULFAMETHOXAZOLE™, DAPSONE™, PENTAMIDINE™, and/or ATOVAQUONE™ to prophylactically treat or prevent an opportunistic Pneumocystis carinii pneumonia infection. In another specific embodiment, Therapeutics of the invention are used in any combination with ISONIAZID™, RIFAMPIN™, PYRAZINAMIDE™, and/or ETHAMBUTOL™ to prophylactically treat or prevent an opportunistic Mycobacterium avium complex infection. In another specific embodiment, Therapeutics of the invention are used in any combination with RIFABUTIN™, CLARITHROMYCIN™, and/or AZITHROMYCIN™ to prophylactically treat or prevent an opportunistic Mycobacterium tuberculosis infection. In another specific embodiment, Therapeutics of the invention are used in any combination with GANCICLOVIR™, FOSCARNET™, and/or CIDOFOVIR™ to prophylactically treat or prevent an opportunistic cytomegalovirus infection. In another specific embodiment, Therapeutics of the invention are used in any combination with FLUCONAZOLE™, ITRACONAZOLE™, and/or KETOCONAZOLE™ to prophylactically treat or prevent an opportunistic fungal infection. In another specific embodiment, Therapeutics of the invention are used in any combination with ACYCLOVIR™ and/or FAMCICOLVIR™ to prophylactically treat or prevent an opportunistic herpes simplex virus type I and/or type II infection. In another specific embodiment, Therapeutics of the invention are used in any combination with PYRIMETHAMINE™ and/or LEUCOVORIN™ to prophylactically treat or prevent an opportunistic Toxoplasma gondii infection. In another specific embodiment, Therapeutics of the invention are used in any combination with LEUCOVORIN™ and/or NEUPOGEN™ to prophylactically treat or prevent an opportunistic bacterial infection.

[1039] In a further embodiment, the Therapeutics of the invention are administered in combination with an antibiotic agent. Antibiotic agents that may be administered with the Therapeutics of the invention include, but are not limited to, amoxicillin, beta-lactamases, aminoglycosides, beta-lactam (glycopeptide), beta-lactamases, Clindamycin, chloramphenicol, cephalosporins, ciprofloxacin, ciprofloxacin, erythromycin, fluoroquinolones, macrolides, metronidazole, penicillins, quinolones, rapamycin, rifampin, streptomycin, sulfonamide, tetracyclines, trimethoprim, trimethoprim-sulfamthoxazole, and vancomycin.

[1040] In other embodiments, Therapeutics of the invention are administered in combination with immunosuppressive agents. Immunosuppressive agents that may be administered in combination with the Therapeutics of the invention include, but are not limited to, steroids, cyclosporine, cyclosporine analogs, cyclophosphamide methylprednisone, prednisone, azathioprine, FK-506, 15-deoxyspergualin, and other immunosuppressive agents that act by suppressing the function of responding T cells. Other immunosuppressive agents that may be administered in combination with the Therapeutics of the invention include, but are not limited to, prednisolone, methotrexate, thalidomide, methoxsalen, rapamycin, leflunomide, mizoribine (BREDININ™), brequinar, deoxyspergualin, and azaspirane (SKF 105685), ORTHOCLONE OKT® 3 (muromonab-CD3), SANDIMMUNE™, NEORAL™, SANGDYA™ (cyclosporine), PROGRAF® (FK506, tacrolimus), CELLCEPT® (mycophenolate motefil, of which the active metabolite is mycophenolic acid), IMURAN™ (azathioprine), glucocorticosteroids, adrenocortical steroids such as DELTASONE™ (prednisone) and HYDELTRASOL™ (prednisolone), FOLEX™ and MEXATE™ (methotrxate), OXSORALEN-ULTRA™ (methoxsalen) and RAPAMUNE™ (sirolimus). In a specific embodiment, immunosuppressants may be used to prevent rejection of organ or bone marrow transplantation.

[1041] In an additional embodiment, Therapeutics of the invention are administered alone or in combination with one or more intravenous immune globulin preparations. Intravenous immune globulin preparations that may be administered with the Therapeutics of the invention include, but not limited to, GAMMAR™, IVEEGAM™, SANDOGLOBULIN™, GAMMAGARD S/D™, ATGAM™ (antithymocyte glubulin), and GAMIMUNE™. In a specific embodiment, Therapeutics of the invention are administered in combination with intravenous immune globulin preparations in transplantation therapy (e.g., bone marrow transplant).

[1042] In certain embodiments, the Therapeutics of the invention are administered alone or in combination with an anti-inflammatory agent. Anti-inflammatory agents that may be administered with the Therapeutics of the invention include, but are not limited to, corticosteroids (e.g. betamethasone, budesonide, cortisone, dexamethasone, hydrocortisone, methylprednisolone, prednisolone, prednisone, and triamcinolone), nonsteroidal anti-inflammatory drugs (e.g., diclofenac, diflunisal, etodolac, fenoprofen, floctafenine, flurbiprofen, ibuprofen, indomethacin, ketoprofen, meclofenamate, mefenamic acid, meloxicam, nabumetone, naproxen, oxaprozin, phenylbutazone, piroxicam, sulindac, tenoxicam, tiaprofenic acid, and tolmetin.), as well as antihistamines, aminoarylcarboxylic acid derivatives, arylacetic acid derivatives, arylbutyric acid derivatives, arylcarboxylic acids, arylpropionic acid derivatives, pyrazoles, pyrazolones, salicylic acid derivatives, thiazinecarboxamides, e-acetamidocaproic acid, S-adenosylmethionine, 3-amino-4-hydroxybutyric acid, amixetrine, bendazac, benzydamine, bucolome, difenpiramide, ditazol, emorfazone, guaiazulene, nabumetone, nimesulide, orgotein, oxaceprol, paranyline, perisoxal, pifoxime, proquazone, proxazole, and tenidap.

[1043] In an additional embodiment, the compositions of the invention are administered alone or in combination with an anti-angiogenic agent. Anti-angiogenic agents that may be administered with the compositions of the invention include, but are not limited to, Angiostatin (Entremed, Rockville, Md.), Troponin-1 (Boston Life Sciences, Boston, Mass.), anti-Invasive Factor, retinoic acid and derivatives thereof, paclitaxel (Taxol), Suramin, Tissue Inhibitor of Metalloproteinase-1, Tissue Inhibitor of Metalloproteinase-2, VEGI, Plasminogen Activator Inhibitor-1, Plasminogen Activator Inhibitor-2, and various forms of the lighter “d group” transition metals.

[1044] Lighter “d group” transition metals include, for example, vanadium, molybdenum, tungsten, titanium, niobium, and tantalum species. Such transition metal species may form transition metal complexes. Suitable complexes of the above-mentioned transition metal species include oxo transition metal complexes.

[1045] Representative examples of vanadium complexes include oxo vanadium complexes such as vanadate and vanadyl complexes. Suitable vanadate complexes include metavanadate and orthovanadate complexes such as, for example, ammonium metavanadate, sodium metavanadate, and sodium orthovanadate. Suitable vanadyl complexes include, for example, vanadyl acetylacetonate and vanadyl sulfate including vanadyl sulfate hydrates such as vanadyl sulfate mono- and trihydrates.

[1046] Representative examples of tungsten and molybdenum complexes also include oxo complexes. Suitable oxo tungsten complexes include tungstate and tungsten oxide complexes. Suitable tungstate complexes include ammonium tungstate, calcium tungstate, sodium tungstate dihydrate, and tungstic acid. Suitable tungsten oxides include tungsten (IV) oxide and tungsten (VI) oxide. Suitable oxo molybdenum complexes include molybdate, molybdenum oxide, and molybdenyl complexes. Suitable molybdate complexes include ammonium molybdate and its hydrates, sodium molybdate and its hydrates, and potassium molybdate and its hydrates. Suitable molybdenum oxides include molybdenum (VI) oxide, molybdenum (VI) oxide, and molybdic acid. Suitable molybdenyl complexes include, for example, molybdenyl acetylacetonate. Other suitable tungsten and molybdenum complexes include hydroxo derivatives derived from, for example, glycerol, tartaric acid, and sugars.

[1047] A wide variety of other anti-angiogenic factors may also be utilized within the context of the present invention. Representative examples include, but are not limited to, platelet factor 4; protamine sulphate; sulphated chitin derivatives (prepared from queen crab shells), (Murata et al., Cancer Res. 51:22-26, (1991)); Sulphated Polysaccharide Peptidoglycan Complex (SP-PG) (the function of this compound may be enhanced by the presence of steroids such as estrogen, and tamoxifen citrate); Staurosporine; modulators of matrix metabolism, including for example, proline analogs, cishydroxyproline, d,L-3,4-dehydroproline, Thiaproline, alpha,alpha-dipyridyl, aminopropionitrile fumarate; 4-propyl-5-(4-pyridinyl)-2(3H)-oxazolone; Methotrexate; Mitoxantrone; Heparin; Interferons; 2 Macroglobulin-serum; ChIMP-3 (Pavloffet al., J. Bio. Chem. 267:17321-17326, (1992)); Chymostatin (Tomkinson et al., Biochem J. 286:475-480, (1992)); Cyclodextrin Tetradecasulfate; Epohemycin; Camptothecin; Fumagillin (Ingber et al., Nature 348:555-557, (1990)); Gold Sodium Thiomalate (“GST”; Matsubara and Ziff, J. Clin. Invest. 79:1440-1446, (1987)); anticollagenase-serum; alpha2-antiplasmin (Holmes et al., J. Biol. Chem. 262(4): 1659-1664, (1987)); Bisantrene (National Cancer Institute); Lobenzarit disodium (N-(2)-carboxyphenyl-4-chloroanthronilic acid disodium or “CCA”; (Takeuchi et al., Agents Actions 36:312-316, (1992)); and metalloproteinase inhibitors such as BB94.

[1048] Additional anti-angiogenic factors that may also be utilized within the context of the present invention include Tbalidomide, (Celgene, Warren, N.J.); Angiostatic steroid; AGM-1470 (H. Brem and J. Folkman J Pediatr. Surg. 28:445-51 (1993)); an integrin alpha v beta 3 antagonist (C. Storgard et al., J. Clin. Invest. 103:47-54 (1999)); carboxynaminolmidazole; Carboxyamidotriazole (CAI) (National Cancer Institute, Bethesda, Md.); Conbretastatin A-4 (CA4P) (OXiGENE, Boston, Mass.); Squalamine (Magainin Pharmaceuticals, Plymouth Meeting, Pa.); TNP-470, (Tap Pharmaceuticals, Deerfield, Ill.); ZD-0101 AstraZeneca (London, UK); APRA (CT2584); Benefin, Byrostatin-1 (SC339555); CGP-41251 (PKC 412); CM101; Dexrazoxane (ICRF 187); DMXAA; Endostatin; Flavopridiol; Genestein; GTE; ImmTher; Iressa (ZDI839); Octreotide (Somatostatin); Panretin; Penacillamine; Photopoint; PI-88; Prinomastat (AG-3340) Purlytin; Suradista (FCE26644); Tamoxifen (Nolvadex); Tazarotene; Tetrathiomolybdate; Xeloda (Capecitabine); and 5-Fluorouracil.

[1049] Anti-angiogenic agents that may be administed in combination with the compounds of the invention may work through a variety of mechanisms including, but not limited to, inhibiting proteolysis of the extracellular matrix, blocking the function of endothelial cell-extracellular matrix adhesion molecules, by antagonizing the function of angiogenesis inducers such as growth factors, and inhibiting integrin receptors expressed on proliferating endothelial cells. Examples of anti-angiogenic inhibitors that interfere with extracellular matrix proteolysis and which may be administered in combination with the compositons of the invention include, but are not Imited to, AG-3340 (Agouron, La Jolla, Calif.), BAY-12-9566 (Bayer, West Haven, Conn.), BMS-275291 (Bristol Myers Squibb, Princeton, N.J.), CGS-27032A (Novartis, East Hanover, N.J.), Marimastat (British Biotech, Oxford, UK), and Metastat (Aetema, St-Foy, Quebec). Examples of anti-angiogenic inhibitors that act by blocking the function of endothelial cell-extracellular matrix adhesion molecules and which may be administered in combination with the compositons of the invention include, but are not Imited to, EMD-121974 (Merck KcgaA Darmstadt, Germany) and Vitaxin (Ixsys, La Jolla, Calif./Medimmune, Gaithersburg, Md.). Examples of anti-angiogenic agents that act by directly antagonizing or inhibiting angiogenesis inducers and which may be administered in combination with the compositons of the invention include, but are not lmited to, Angiozyme (Ribozyme, Boulder, Colo.), Anti-VEGF antibody (Genentech, S. San Francisco, Calif.), PTK-787/ZK-225846 (Novartis, Basel, Switzerland), SU-101 (Sugen, S. San Francisco, Calif.), SU-5416 (Sugen/Pharmacia Upjohn, Bridgewater, N.J.), and SU-6668 (Sugen). Other anti-angiogenic agents act to indirectly inhibit angiogenesis. Examples of indirect inhibitors of angiogenesis which may be administered in combination with the compositons of the invention include, but are not limited to, IM-862 (Cytran, Kirkland, Wash.), Interferon-alpha, IL-12 (Roche, Nutley, N.J.), and Pentosan polysulfate (Georgetown University, Washington, D.C.).

[1050] In particular embodiments, the use of compositions of the invention in combination with anti-angiogenic agents is contemplated for the treatment, prevention, and/or amelioration of an autoimmune disease, such as for example, an autoimmune disease described herein.

[1051] In a particular embodiment, the use of compositions of the invention in combination with anti-angiogenic agents is contemplated for the treatment, prevention, and/or amelioration of arthritis. In a more particular embodiment, the use of compositions of the invention in combination with anti-angiogenic agents is contemplated for the treatment, prevention, and/or amelioration of rheumatoid arthritis.

[1052] In another embodiment, the polynucleotides encoding a polypeptide of the present invention are administered in combination with an angiogenic protein, or polynucleotides encoding an angiogenic protein: Examples of angiogenic proteins that may be administered with the compositions of the invention include, but are not limited to, acidic and basic fibroblast growth factors, VEGF-1, VEGF-2, VEGF-3, epidermal growth factor alpha and beta, platelet-derived endothelial cell growth factor, platelet-derived growth factor, tumor necrosis factor alpha, hepatocyte growth factor, insulin-like growth factor, colony stimulating factor, macrophage colony stimulating factor, granulocyte/macrophage colony stimulating factor, and nitric oxide synthase.

[1053] In additional embodiments, compostions of the invention are administered in combination with a chemotherapeutic agent. Chemotherapeutic agents that may be administered with the Therapeutics of the invention include, but are not limited to alkylating agents such as nitrogen mustards (for example, Mechlorethamine, cyclophosphamide, Cyclophosphamide Ifosfamide, Melphalan (L-sarcolysin), and Chlorambucil), ethylenimines and methylmelamines (for example, Hexamethylmelamine and Thiotepa), alkyl sulfonates (for example, Busulfan), nitrosoureas (for example, Carmustine (BCNU), Lomustine (CCNU), Semustine (methyl-CCNU), and Streptozocin (streptozotocin)), triazenes (for example, Dacarbazine (DTIC; dimethyltriazenoimidazolecarboxamide)), folic acid analogs. (for example, Methotrexate (amethopterin)), pyrimidine analogs (for example, Fluorouacil (5-fluorouracil; 5-FU), Floxuridine (fluorodeoxyuridine; FudR), and Cytarabine (cytosine arabinoside)), purine analogs and related inhibitors (for example, Mercaptopurine (6-mercaptopurine; 6-MP), Thioguanine (6-thioguanine; TG), and Pentostatin (2′-deoxycoformycin)), vinca alkaloids (for example, Vinblastine (VLB, vinblastine sulfate) and Vincristine (vincristine sulfate)), epipodophyllotoxins (for example, Etoposide and Teniposide), antibiotics (for example, Dactinomycin (actinomycin D), Daunorubicin (daunomycin; rubidomycin), Doxorubicin, Bleomycin, Plicamycin (mithramycin), and Mitomycin (mitomycin C), enzymes (for example, L-Asparaginase), biological response modifiers (for example, Interferon-alpha and interferon-alpha-2b), platinum coordination compounds (for example, Cisplatin (cis-DDP) and Carboplatin), anthracenedione (Mitoxantrone), substituted ureas (for example, Hydroxyurea), methylhydrazine derivatives (for example, Procarbazine CN-methylhydrazine; MIH), adrenocorticosteroids (for example, Prednisone), progestins (for example, Hydroxyprogesterone caproate, Medroxyprogesterone, Medroxyprogesterone acetate, and Megestrol acetate), estrogens (for example, Diethylstilbestrol (DES), Diethylstilbestrol diphosphate, Estradiol, and Ethinyl estradiol), antiestrogens (for example, Tamoxifen), androgens (Testosterone proprionate, and Fluoxymesterone), antiandrogens (for example, Flutamide), gonadotropin-releasing horomone analogs (for example, Leuprolide), other hormones and hormone analogs (for example, methyltestosterone, estramustine, estramustine phosphate sodium, chlorotrianisene, and testolactone), and others (for example, dicarbazine, glutamic acid, and mitotane).

[1054] In one embodiment, the compositions of the invention are administered in combination with one or more of the following drugs: infliximab (also known as Remicade™ Centocor, Inc.), Trocade (Roche, RO-32′-3555), Leflunomide (also known as Arava™ from Hoechst Marion Roussel), Kineret™ (an IL-1 Receptor antagonist also known as Anakinra from Amgen, Inc.).

[1055] In a specific embodiment, compositions of the invention are administered in combination with CHOP (cyclophosphamide, doxorubicin, vincristine, and prednisone) or combination of one or more of the components of CHOP. In one embodiment, the compositions of the invention are administered in combination with anti-CD20 antibodies, human monoclonal anti-CD20 antibodies. In another embodiment, the compositions of the invention are administered in combination with anti-CD20 antibodies and CHOP, or anti-CD20 antibodies and any combination of one or more of the components of CHOP, particularly cyclophosphamide and/or prednisone. In a specific embodiment, compositions of the invention are administered in combination with Rituximab. In a further embodiment, compositions of the invention are administered with Rituximab and CHOP, or Rituximab and any combination of one or more of the components of CHOP, particularly cyclophosphamide and/or prednisone. In a specific embodiment, compositions of the invention are administered in combination with tositumomab. In a further embodiment, compositions of the invention are administered with tositumomab and CHOP, or tositumomab and any combination of one or more of the components of CHOP, particularly cyclophosphamide and/or prednisone. The anti-CD20 antibodies may optionally be associated with radioisotopes, toxins or cytotoxic prodrugs.

[1056] In another specific embodiment, the compositions of the invention are administered in combination Zevalin™. In a further embodiment, compositions of the invention are administered with Zevalin™ and CHOP, or Zevalin™ and any combination of one or more of the components of CHOP, particularly cyclophosphamide and/or prednisone. Zevalin™ may be associated with one or more radisotopes. Particularly preferred isotopes are ⁹⁰Y and ¹¹¹In.

[1057] In an additional embodiment, the Therapeutics of the invention are administered in combination with cytokines. Cytokines that may be administered with the Therapeutics of the invention include, but are not limited to, IL2, IL3, IL4, IL5, IL6, IL7, IL 10, IL12, IL13, IL15, anti-CD40, CD40L, IFN-gamma and TNF-alpha. In another embodiment, Therapeutics of the invention may be administered with any interleukin, including, but not limited to, IL-1alpha, IL-1beta, IL-2, IL-3, IL-4, IL-5, IL-6, IL-7, IL-8, IL-9, IL-10, IL-11, IL-12, IL-13, IL-14, IL-15, IL-16, IL-17, IL-18, IL-19, IL-20, and IL-21.

[1058] In one embodiment, the Therapeutics of the invention are administered in combination with members of the TNF family. TNF, TNF-related or TNF-like molecules that may be administered with the Therapeutics of the invention include, but are not limited to, soluble forms of TNF-alpha, lymphotoxin-alpha (LT-alpha, also known as TNF-beta), LT-beta (found in complex heterotrimer LT-alpha2-beta), OPGL, FasL, CD27L, CD30L, CD40L, 4-IBBL, DcR3, OX40L, TNF-gamma (International Publication No. WO 96/14328), AIM-I (International Publication No. WO 97/33899), endokine-alpha (International Publication No. WO 98/07880), OPG, and neutrokine-alpha (International Publication No. WO 98/18921, OX40, and nerve growth factor (NGF), and soluble forms of Fas, CD30, CD27, CD40 and 4-IBB, TR2 (International Publication No. WO 96/34095), DR3 (International Publication No. WO 97/33904), DR4 (International Publication No. WO 98/32856), TR5 (International Publication No. WO 98/30693), TRANK, TR9 (International Publication No. WO 98/56892), TR10 (International Publication No. WO 98/54202), 312C2 (International Publication No. WO 98/06842), and TR12, and soluble forms CD154, CD70, and CD153.

[1059] In an additional embodiment, the Therapeutics of the invention are administered in combination with angiogenic proteins. Angiogenic proteins that may be administered with the Therapeutics of the invention include, but are not limited to, Glioma Derived Growth Factor (GDGF), as disclosed in European Patent Number EP-399816; Platelet Derived Growth Factor-A (PDGF-A), as disclosed in European Patent Number EP-682110; Platelet Derived Growth Factor-B (PDGF-B), as disclosed in European Patent Number EP-282317; Placental Growth Factor (PIGF), as disclosed in International Publication Number WO 92/06194; Placental Growth Factor-2 (PIGF-2), as disclosed in Hauser et al., Growth Factors, 4:259-268 (1993); Vascular Endothelial Growth Factor (VEGF), as disclosed in International Publication Number WO 90/13649; Vascular Endothelial Growth Factor-A (VEGF-A), as disclosed in European Patent Number EP-506477; Vascular Endothelial Growth Factor-2 (VEGF-2), as disclosed in International Publication Number WO 96/39515; Vascular Endothelial Growth Factor B (VEGF-3); Vascular Endothelial Growth Factor B-186 (VEGF-B186), as disclosed in International Publication Number WO 96/26736; Vascular Endothelial Growth Factor-D (VEGF-D), as disclosed in International Publication Number WO 98/02543; Vascular Endothelial Growth Factor-D (VEGF-D), as disclosed in International Publication Number WO 98/07832; and Vascular Endothelial Growth Factor-E (VEGF-E), as disclosed in German Patent Number DE19639601. The above mentioned references are herein incorporated by reference in their entireties.

[1060] In an additional embodiment, the Therapeutics of the invention are administered in combination with Fibroblast Growth Factors. Fibroblast Growth Factors that may be administered with the Therapeutics of the invention include, but are not limited to, FGF-1, FGF-2, FGF-3, FGF-4, FGF-5, FGF-6, FGF-7, FGF-8, FGF-9, FGF-10, FGF-1 I, FGF-12, FGF-13, FGF-14, and FGF-15.

[1061] In an additional embodiment, the Therapeutics of the invention are administered in combination with hematopoietic growth factors. Hematopoietic growth factors that may be administered with the Therapeutics of the invention include, but are not limited to, granulocyte macrophage colony stimulating factor (GM-CSF) (sargramostim, LEUKINE™, PROKINE™), granulocyte colony stimulating factor (G-CSF) (filgrastim, NEUPOGEN™), macrophage colony stimulating factor (M-CSF, CSF-1) erythropoietin (epoetin alfa, EPOGEN™, PROCRIT™), stem cell factor (SCF, c-kit ligand, steel factor), megakaryocyte colony stimulating factor, PIXY321 (a GMCSF/IL-3 fusion protein), interleukins, especially any one or more of IL-1 through IL-12, interferon-gamma, or thrombopoietin.

[1062] In certain embodiments, Therapeutics of the present invention are administered in combination with adrenergic blockers, such as, for example, acebutolol, atenolol, betaxolol, bisoprolol, carteolol, labetalol, metoprolol, nadolol, oxprenolol, penbutolol, pindolol, propranolol, sotalol, and timolol.

[1063] In another embodiment, the Therapeutics of the invention are administered in combination with an antiarrhythmic drug (e.g., adenosine, amidoarone, bretylium, digitalis, digoxin, digitoxin, diliazem, disopyramide, esmolol, flecainide, lidocaine, mexiletine, moricizine, phenytoin, procainamide, N-acetyl procainamide, propafenone, propranolol, quinidine, sotalol, tocainide, and verapamil).

[1064] In another embodiment, the Therapeutics of the invention are administered in combination with diuretic agents, such as carbonic anhydrase-inhibiting agents (e.g., acetazolamide, dichlorphenamide, and methazolamide), osmotic diuretics (e.g., glycerin, isosorbide, mannitol, and urea), diuretics that inhibit Na⁺-K⁺-2Cl⁻ symport (e.g., furosemide, bumetamide, azosemide, piretamide, tripamide, ethacrynic acid, muzolimine, and torsemide), thiazide and thiazide-like diuretics (e.g., bendroflumethiazide, benzthiazide, chlorothiazide, hydrochlorothiazide, hydroflumethiazide, methyclothiazide, polythiazide, trichormethiazide, chlorthalidone, indapamide, metolazone, and quinethazone), potassium sparing diuretics (e.g., amiloride and triamterene), and mineralcorticoid receptor antagonists (e.g., spironolactone, canrenone, and potassium canrenoate).

[1065] In one embodiment, the Therapeutics of the invention are administered in combination with treatments for endocrine and/or hormone imbalance disorders. Treatments for endocrine and/or hormone imbalance disorders include, but are not limited to, ¹²⁷I, radioactive isotopes of iodine such as ¹³¹I and ¹²³I; recombinant growth hormone, such as HUMATROPE™ (recombinant somatropin); growth hormone analogs such as PROTROPIN™ (somatrem); dopamine agonists such as PARLODEL™ (bromocriptine); somatostatin analogs such as SANDOSTATIN™ (octreotide); gonadotropin preparations such as PREGNYL™, A.P.L.™ and PROFASI™ (chorionic gonadotropin (CG)), PERGONAL™ (menotropins), and METRODIN™ (urofollitropin (uFSH)); synthetic human gonadotropin releasing hormone preparations such as FACTREL™ and LUTREPULSE™ (gonadorelin hydrochloride); synthetic gonadotropin agonists such as LUPRON™ (leuprolide acetate), SUPPRELIN™ (histrelin acetate), SYNAREL™ (nafarelin acetate), and ZOLADEX™ (goserelin acetate); synthetic preparations of thyrotropin-releasing hormone such as RELEFACT TRH™ and THYPINONE™ (protirelin); recombinant human TSH such as THYROGEN™; synthetic preparations of the sodium salts of the natural isomers of thyroid hormones such as L-T₄™, SYNTHROID™ and LEVOTHROID™ (levothyroxine sodium), L-T₃™, CYTOMEL™ and TRIOSTAT™ (liothyroine sodium), and THYROLAR™ (liotrix); antithyroid compounds such as 6-n-propylthiouracil (propylthiouracil), 1-methyl-2-mercaptoimidazole and TAPAZOLE™ (methimazole), NEO-MERCAZOLE™ (carbimazole); beta-adrenergic receptor antagonists such as propranolot and esmolol; Ca²⁺ channel blockers; dexamethasone and iodinated radiological contrast agents such as TELEPAQUE™ (iopanoic acid) and ORAGRAFIN™ (sodium ipodate); estrogens or congugated estrogens such as ESTRACE™ (estradiol), ESTINYL™ (ethinyl estradiol), PREMARIN™, ESTRATAB™, ORTHO-EST™, OGEN™ and estropipate (estrone), ESTROVIS™ (quinestrol), ESTRADERM™ (estradiol), DELESTROGEN™ and VALERGEN™ (estradiol valerate), DEPO-ESTRADIOL CYPIONATE™ and ESTROJECT LA™ (estradiol cypionate); antiestrogens such as NOLVADEX™ (tamoxifen), SEROPHENE™ and CLOMID™ (clomiphene); progestins such as DURALUTIN™ (hydroxyprogesterone caproate), MPA™ and DEPO-PROVERA™ (medroxyprogesterone acetate), PROVERA™ and CYCRIN™ (MPA), MEGACE™ (megestrol acetate), NORLUTIN™ (norethindrone), and NORLUTATE™ and AYGESTIN™ (norethindrone acetate); progesterone implants such as NORPLANT SYSTEM™ (subdermal implants of norgestrel); antiprogestins such as RU 486™ (mifepristone); hormonal contraceptives such as ENOVID™ (norethynodrel plus mestranol), PROGESTASERT™ (intrauterine device that releases progesterone), LOESTRIN™, BREVICON™, MODICON™, GENORA™, NELONA™, NORINYL™, OVACON-35™ and OVACON-50™ (ethinyl estradiol/norethindrone), LEVLEN™, NORDETTE™, TR1-LEVLEN™ and TRIPHASIL-21™ (ethinyl estradiolllevonorgestrel) LO/OVRAL™ and OVRAL™ (ethinyl estradiol/norgestrel), DEMULEN™ (ethinyl estradiol/ethynodiol diacetate), NORINYL™, ORTHO-NOVUM™, NORETHIN™, GENORA™, and NELOVA™ (norethindrone/mestranol), DESOGEN™ and ORTHO-CEPT™ (ethinyl estradiol/desogestrel), ORTHO-CYCLEN™ and ORTHO-TRICYCLEN™ (ethinyl estradiol/norgestimate), MICRONOR™ and NOR-QD™ (norethindrone), and OVRETTE™ (norgestrel); testosterone esters such as methenotone acetate and testosterone undecanoate; parenteral and oral androgens such as TESTOJECT-50™ (testosterone), TESTEX™ (testosterone propionate), DELATESTRYL™ (testosterone enanthate), DEPO-TESTOSTERONE™ (testosterone cypionate), DANOCRINE™ (danazol), HALOTESTIN™ (fluoxymesterone), ORETON METHYL™, TESTRED™ and VIRILON™ (methyltestosterone), and OXANDRIN™ (oxandrolone); testosterone transdermal systems such as TESTODERM™; androgen receptor antagonist and 5-alpha-reductase inhibitors such as ANDROCUR™ (cyproterone acetate), EULEXIN™ (flutamide), and PROSCAR™ (finasteride); adrenocorticotropic hormone preparations such as CORTROSYN™ (cosyntropin); adrenocortical steroids and their synthetic analogs such as ACLOVATE™ (alclometasone dipropionate), CYCLOCORT™ (amcinonide), BECLOVENT™ and VANCERIL™ (beclomethasone dipropionate), CELESTONE™ (betamethasone), BENISONE™ and UTICORT™ (betamethasone benzoate), DIPROSONE™ (betamethasone dipropionate), CELESTONE PHOSPHATE™ (betamethasone sodium phosphate), CELESTONE SOLUSPAN™ (betamethasone sodium phosphate and acetate), BETA-VAL™ and VALISONE™ (betamethasone valerate), TEMOVATE™ (clobetasol propionate), CLODER™ (clocortolone pivalate), CORTEF™ and HYDROCORTONE™ (cortisol (hydrocortisone)), HYDROCORTONE ACETATE™ (cortisol (hydrocortisone) acetate), LOCOID™ (cortisol (hydrocortisone) butyrate), HYDROCORTONE PHOSPHATE™ (cortisol (hydrocortisone) sodium phosphate), A-HYDROCORT™ and SOLU CORTEF™ (cortisol (hydrocortisone) sodium succinate), WESTCORT™ (cortisol (hydrocortisone) vaterate), CORTISONE ACETATE™ (cortisone acetate), DESOWEN™ and TRIDESILON™ (desonide), TOPICORT™ (desoximetasone), DECADRON™ (dexamethasone), DECADRON LA™ (dexamethasone acetate), DECADRON PHOSPHATE™ and HEXADROL PHOSPHATE™ (dexamethasone sodium phosphate), FLORONE™ and MAXIFLOR™ (diflorasone diacetate), FLORINEF ACETATE™ (fludrocortisone acetate), AEROBID™ and NASALIDE™ (flunisolide), FLUONID™ and SYNALAR™ (tluocinolone acetonide), LIDEX™ (fluocinonide), FLUOR-OP™ and FML™ (fluorometholone), CORDRAN™ (flurandrenolide), HALOG™ (halcinonide), HMS LIZUIFILM™ (medrysone), MEDROL™ (methylprednisolone), DEPO-MEDROL™ and MEDROL ACETATE™ (methylprednisone acetate), A-METHAPRED™ and SOLUMEDROL™ (methylprednisolone sodium succinate), ELOCON™ (mometasone furoate), HALDRONE™ (paramethasone acetate), DELTA-CORTEF™ (prednisolone), ECONOPRED™ (prednisolone acetate), HYDELTRASOL™ (prednisolone sodium phosphate), HYDELTRA-T.B.A” (prednisolone tebutate), DELTASONE™ (prednisone), ARISTOCORT™ and KENACORT™ (triamcinolone), KENALOGI™ (triamcinolone acetonide), ARISTOCORT™ and KENACORT DIACETATE™ (triamcinolone diacetate), and ARISTOSPAN™ (triamcinolone hexacetonide); inhibitors of biosynthesis and action of adrenocortical steroids such as CYTADREN™ (aminoglutethimide), NIZORAL™ (ketoconazole), MODRASTANE™ (trilostane), and METOPIRONE™ (metyrapone); bovine, porcine or human insulin or mixtures thereof; insulin analogs; recombinant human insulin such as HUMULIN™ and NOVOLIN™ oral hypoglycemic agents such as ORAMIDE™ and ORINASE™ (totbutamide), DIABFNESE™ (chlorpropamide), TOLAMIDE™ and TOLINASE™ (tolazamide), DYMELOR™ (acetohexamide), glibenclamide, MICRONASE™, DIBETA™ and GLYNASE™ (glyburide), GLUCOTROL™ (glipizide), and DIAMICRON™ (gliclazide), GLUCOPHAGE™ (metformin), ciglitazone, pioglitazone, and alpha-glucosidase inhibitors; bovine or porcine glucagon; somatostatins such as SANDOSTATIN™ (octreotide); and diazoxides such as PROGLYCEM™ (diazoxide).

[1066] In one embodiment, the Therapeutics of the invention are administered in combination with treatments for uterine motility disorders. Treatments for uterine motility disorders include, but are not limited to, estrogen drugs such as conjugated estrogens (e.g., PREMARIN® and ESTRATAB®), estradiols (e.g., CLIMARA® and ALORA®), estropipate, and chlorotrianisene; progestin drugs (e.g., AMEN® (medroxyprogesterone), MICRONOR® (norethidrone acetate), PROMETRIUM® progesterone, and megestrol acetate); and estrogen/progesterone combination therapies such as, for example, conjugated estrogens/medroxyprogesterone (e.g., PREMPRO™ and PREMPHASE®) and norethindrone acetate/ethinyl estsradiot (e.g., FEMHRT™).

[1067] In an additional embodiment, the Therapeutics of the invention are administered in combination with drugs effective in treating iron deficiency and hypochromic anemias, including but not limited to, ferrous sulfate (iron sulfate, FEOSOL™), ferrous fumarate (e.g., FEOSTAT™), ferrous gluconate (e.g., FERGON™), polysaccharide-iron complex (e.g., NIFEREX™), iron dextran injection (e.g., INFED™), cupric sulfate, pyroxidine, riboflavin, Vitamin B₁₂, cyancobalamin injection (e.g., REDISOL™, RUBRAMIN PC™), hydroxocobalamin, folic acid (e.g., FOLVITE™), leucovorin (folinic acid, 5-CHOH4PteGlu, citrovorum factor) or WELLCOVORIN (Calcium salt of leucovorin), transferrin or ferritin.

[1068] In certain embodiments, the Therapeutics of the invention are administered in combination with agents used to treat psychiatric disorders. Psychiatric drugs that may be administered with the Therapeutics of the invention include, but are not limited to, antipsychotic agents (e.g., chlorpromazine, chlorprothixene, clozapine, fluphenazine, haloperidol, loxapine, mesoridazine, molindone, olanzapine, perphenazine, pimozide, quetiapine, risperidone, thioridazine, thiothixene, trifluoperazine, and triflupromazine), antimanic agents (e.g., carbamazepine, divalproex sodium, lithium carbonate, and lithium citrate), antidepressants (e.g., amitriptyline, amoxapine, bupropion, citalopram, clomipramine, desipramine, doxepin, fluvoxamine, fluoxetine, imipramine, isocarboxazid, maprotiline, mirtazapine, nefazodone, nortriptyline, paroxetine, phenelzine, protriptyline, sertraline, tranylcypromine, trazodone, trimipramine, and venlafaxine), antianxiety agents (e.g., alprazolam, buspirone, chlordiazepoxide, clorazepate, diazepam, halazepam, lorazepam, oxazepam, and prazepam), and stimulants (e.g., d-amphetamine, methylphenidate, and pemoline).

[1069] In other embodiments, the Therapeutics of the invention are administered in combination with agents used to treat neurological disorders. Neurological agents that may be administered with the Therapeutics of the invention include, but are not limited to, antiepileptic agents (e.g., carbamazepine, clonazepam, ethosuximide, phenobarbital, phenytoin, primidone, valproic acid, divalproex sodium, felbamate, gabapentin, lamotrigine, levetiracetam, oxcarbazepine, tiagabine, topiramate, zonisamide, diazepam, lorazepam, and clonazepam), antiparkinsonian agents (e.g., levodopa/carbidopa, selegiline, amantidine, bromocriptine, pergolide, ropinirole, pramipexole, benztropine; biperiden; ethopropazine; procyclidine; trihexyphenidyl, tolcapone), and ALS therapeutics (e.g. riluzole).

[1070] In another embodiment, Therapeutics of the invention are administered in combination with vasodilating agents and/or calcium channel blocking agents. Vasodilating agents that may be administered with the Therapeutics of the invention include, but are not limited to, Angiotensin Converting Enzyme (ACE) inhibitors (e.g., papaverine, isoxsuprine, benazepril, captopril, cilazapril, enalapril, enalaprilat, fosinopril, lisinopril, moexipril, perindopril, quinapril, ramipril, spirapril, trandolapril, and nylidrin), and nitrates (e.g., isosorbide dinitrate, isosorbide mononitrate, and nitroglycerin). Examples of calcium channel blocking agents that may be administered in combination with the Therapeutics of the invention include, but are not limited to amlodipine, bepridil, diltiazem, felodipine, flunarizine, isradipine, nicardipine, nifedipine, nimodipine, and verapamil.

[1071] In additional embodiments, the Therapeutics of the invention are administered in combination with other therapeutic or prophylactic regimens, such as, for example, radiation therapy.

### Example 14

### Method of Treating Decreased Levels of the Polypeptide

[1072] The present invention relates to a method for treating an individual in need of an increased level of a polypeptide of the invention in the body comprising administering to such an individual a composition comprising a therapeutically effective amount of an agonist of the invention (including polypeptides of the invention). Moreover, it will be appreciated that conditions caused by a decrease in the standard or normal expression level of a polypeptide of the present invention in an individual can be treated by administering the agonist or antagonist of the present invention. Thus, the invention also provides a method of treatment of an individual in need of an increased level of the polypeptide comprising administering to such an individual a Therapeutic comprising an amount of the agonist or antagonist to increase the activity level of the polypeptide in such an individual.

[1073] For example, a patient with decreased levels of a polypeptide receives a daily dose 0.1-100 ug/kg of the agonist or antagonist for six consecutive days. The exact details of the dosing scheme, based on administration and formulation, are provided in Example 13.

### Example 15

### Method of Treating Increased Levels of the Polypeptide

[1074] The present invention also relates to a method of treating an individual in need of a decreased level of a polypeptide of the invention in the body comprising administering to such an individual a composition comprising a therapeutically effective amount of an antagonist of the invention (including polypeptides and antibodies of the invention).

[1075] In one example, antisense technology is used to inhibit production of a polypeptide of the present invention. This technology is one example of a method of decreasing levels of a polypeptide, due to a variety of etiologies, such as cancer.

[1076] For example, a patient diagnosed with abnormally increased levels of a polypeptide is administered intravenously antisense polynucleotides at 0.5, 1.0, 1.5, 2.0 and 3.0 mg/kg day for 21 days. This treatment is repeated after a 7-day rest period if the treatment was well tolerated. The formulation of the antisense polynucleotide is provided in Example 13.

### Example 16

### Method of Treatment Using Gene Therapy-ex vivo

[1077] One method of gene therapy transplants fibroblasts, which are capable of expressing a polypeptide, onto a patient. Generally, fibroblasts are obtained from a subject by skin biopsy. The resulting tissue is placed in tissue-culture medium and separated into small pieces. Small chunks of the tissue are placed on a wet surface of a tissue culture flask, approximately ten pieces are placed in each flask. The flask is turned upside down, closed tight and left at room temperature over night. After 24 hours at room temperature, the flask is inverted and the chunks of tissue remain fixed to the bottom of the flask and fresh media (e.g., Ham's F12 media, with 10% FBS, penicillin and streptomycin) is added. The flasks are then incubated at 37 degree C. for approximately one week.

[1078] At this time, fresh media is added and subsequently changed every several days. After an additional two weeks in culture, a monolayer of fibroblasts emerge. The monolayer is trypsinized and scaled into larger flasks.

[1079] pMV-7 (Kirschmeier, P. T. et al., DNA, 7:219-25 (1988)), flanked by the long terminal repeats of the LMoloney murine sarcoma virus, is digested with EcoRI and HindIII and subsequently treated with calf intestinal phosphatase. The linear vector is fractionated on agarose gel and purified, using glass beads.

[1080] The cDNA encoding a polypeptide of the present invention can be amplified using PCR primers which correspond to the 5′ and 3′ end sequences respectively as set forth in Example 1 using primers and having appropriate restriction sites and initiation/stop codons, if necessary. Preferably, the 5′ primer contains an EcoRI site and the 3′ primer includes, a HindIII site. Equal quantities of the Moloney murine sarcoma virus linear backbone and the amplified EcoRI and HindIII fragment are added together, in the presence of T4 DNA ligase. The resulting mixture is maintained under conditions appropriate for ligation of the two fragments. The ligation mixture is then used to transform bacteria HB101, which are then plated onto agar containing kanamycin for the purpose of confirming that the vector has the gene of interest properly inserted.

[1081] The amphotropic pA317 or GP+am12 packaging cells are grown in tissue culture to confluent density in Dulbecco's Modified Eagles Medium (DMEM) with 10% calf serum (CS), penicillin and streptomycin. The MSV vector containing the gene is then added to the media and the packaging cells transduced with the vector. The packaging cells now produce infectious viral particles containing the gene (the packaging cells are now referred to as producer cells).

[1082] Fresh media is added to the transduced producer cells, and subsequently, the media is harvested from a 10 cm plate of confluent producer cells. The spent media, containing the infectious viral particles, is filtered through a millipore filter to remove detached producer cells and this media is then used to infect fibroblast cells. Media is removed from a sub-confluent plate of fibroblasts and quickly replaced with the media from the producer cells. This media is removed and replaced with fresh media. If the titer of virus is high, then virtually all fibroblasts will be infected and no selection is required. If the titer is very low, then it is necessary to use a retroviral vector that has a selectable marker, such as neo or his. Once the fibroblasts have been efficiently infected, the fibroblasts are analyzed to determine whether protein is produced.

[1083] The engineered fibroblasts are then transplanted onto the host, either alone or after having been grown to confluence on cytodex 3 microcarrier beads.

### Example 17

### Gene Therapy Using Endogenous Genes Corresponding to Polynucleotides of the Invention

[1084] Another method of gene therapy according to the present invention involves operably associating the endogenous polynucleotide sequence of the invention with a promoter via homologous recombination as described, for example, in U.S. Pat. No. 5,641,670, issued Jun. 24, 1997; International Publication NO: WO 96/29411, published Sep. 26, 1996; International Publication NO: WO 94/12650, published Aug. 4, 1994; Koller et al., Proc. Natl. Acad. Sci. USA, 86:8932-8935 (1989); and Zijlstra et al., Nature, 342:435-438 (1989). This method involves the activation of a gene which is present in the target cells, but which is not expressed in the cells, or is expressed at a lower level than desired.

[1085] Polynucleotide constructs are made which contain a promoter and targeting sequences, which are homologous to the 5′ non-coding sequence of endogenous polynucleotide sequence, flanking the promoter. The targeting sequence will be sufficiently near the 5′ end of the polynucleotide sequence so the promoter will be operably linked to the endogenous sequence upon homologous recombination. The promoter and the targeting sequences can be amplified using PCR. Preferably, the amplified promoter contains distinct restriction enzyme sites on the 5′ and 3′ ends. Preferably, the 3′ end of the first targeting sequence contains the same restriction enzyme site as the 5′ end of the amplified promoter and the 5′ end of the second targeting sequence contains the same restriction site as the 3′ end of the amplified promoter.

[1086] The amplified promoter and the amplified targeting sequences are digested with the appropriate restriction enzymes and subsequently treated with calf intestinal phosphatase. The digested promoter and digested targeting sequences are added together in the presence of T4 DNA ligase. The resulting mixture is maintained under conditions appropriate for ligation of the two fragments. The construct is size fractionated on an agarose gel, then purified by phenol extraction and ethanol precipitation.

[1087] In this Example, the polynucleotide constructs are administered as naked polynucleotides via electroporation. However, the polynucleotide constructs may also be administered with transfection-facilitating agents, such as liposomes, viral sequences, viral particles, precipitating agents, etc. Such methods of delivery are known in the art.

[1088] Once the cells are transfected, homologous recombination will take place which results in the promoter being operably linked to the endogenous polynucleotide sequence. This results in the expression of polynucleotide corresponding to the polynucleotide in the cell. Expression may be detected by immunological staining, or any other method known in the art.

[1089] Fibroblasts arc obtained from a subject by skin biopsy. The resulting tissue is placed in DMEM+10% fetal calf serum. Exponentially growing or early stationary phase fibroblasts are trypsinized and rinsed from the plastic surface with nutrient medium. An aliquot of the cell suspension is removed for counting, and the remaining cells are subjected to centrifugation. The supernatant is aspirated and the pellet is resuspended in 5 ml of electroporation buffer (20 mM HEPES pH 7.3, 137 mM NaCl, 5 mM KCl, 0.7 mM Na₂ HPO₄, 6 mM dextrose). The cells are recentrifuged, the supernatant aspirated, and the cells resuspended in electroporation buffer containing 1 mg/ml acetylated bovine serum albumin. The final cell suspension contains approximately 3×10⁶ cells/ml. Electroporation should be performed immediately following resuspension.

[1090] Plasmid DNA is prepared according to standard techniques. For example, to construct a plasmid for targeting to the locus corresponding to the polynucleotide of the invention, plasmid pUC18 (MBI Fermentas, Amherst, N.Y.) is digested with HindIII. The CMV promoter is amplified by PCR with an XbaI site on the 5′ end and a BamHI site on the 3′ end. Two non-coding sequences are amplified via PCR: one non-coding sequence (fragment 1) is amplified with a HindIII site at the 5′ end and an Xba site at the 3′end; the other non-coding sequence (fragment 2) is amplified with a BamHI site at the Send and a HindIII site at the 3′end. The CMV promoter and the fragments (1 and 2) are digested with the appropriate enzymes (CMV promoter—XbaI and BamHI; fragment 1—XbaI; fragment 2—BamHI) and ligated together. The resulting ligation product is digested with HindIII, and ligated with the HindIII-digested pUC18 plasmid.

[1091] Plasmid DNA is added to a sterile cuvette with a 0.4 cm electrode gap (Bio-Rad). The Final DNA concentration is generally at least 120 μg/ml. 0.5 ml of the cell suspension (containing approximately 1.5×10⁶ cells) is then. added to the cuvette, and the cell suspension and DNA solutions are gently mixed. Electroporation is performed with a Gene-Pulser apparatus (Bio-Rad). Capacitance and voltage are set at 960° F. and 250-300 V, respectively. As voltage increases, cell survival decreases, but the percentage of surviving cells that stably incorporate the introduced DNA into their genome increases dramatically. Given these parameters, a pulse time of approximately 14-20 mSec should be observed.

[1092] Electroporated cells are maintained at room temperature for approximately 5 min, and the contents of the cuvette are then gently removed with a sterile transfer pipette. The cells are added directly to 10 ml of prewarmed nutrient media (DMEM with 15% calf serum) in a 10 cm dish and incubated at 37 degree C. The following day, the media is aspirated and replaced with 10 ml of fresh media and incubated for a further 16-24 hours.

[1093] The engineered fibroblasts are then injected into the host, either alone or after having been grown to confluence on cytodex 3 microcarrier beads. The fibroblasts now produce the protein product. The fibroblasts can then be introduced into a patient as described above.

### Example 18

### Method of Treatment Using Gene Therapy—in vivo

[1094] Another aspect of the present invention is using in vivo gene therapy methods to treat disorders, diseases and conditions. The gene therapy method relates to the introduction of naked nucleic acid (DNA, RNA, and antisense DNA or RNA) sequences into an animal to increase or decrease the expression of the polypeptide. The polynucleotide of the present invention may be operatively linked to (i.e., associated with) a promoter or any other genetic elements necessary for the expression of the polypeptide by the target tissue. Such gene therapy and delivery techniques and methods are known in the art, see, for example, WO90/11092, WO98/11779; U.S. Pat. Nos. 5,693,622, 5,705,151, 5,580,859; Tabata et al., Cardiovasc. Res. 35(3):470-479 (1997); Chao et al., Pharmacol. Res. 35(6):517-522 (1997); Wolff, Neuromuscul. Disord. 7(5):314-318 (1997); Schwartz et al., Gene Ther. 3(5):405-411 (1996); Tsurumi et al., Circulation 94(12):3281-3290 (1996) (incorporated herein by reference).

[1095] The polynucleotide constructs may be delivered by any method that delivers injectable materials to the cells of an animal, such as, injection into the interstitial space of tissues (heart, muscle, skin, lung, liver, intestine and the like). The polynucleotide constructs can be delivered in a pharmaceutically acceptable liquid or aqueous carrier.

[1096] The term “naked” polynucleotide, DNA or RNA, refers to sequences that are free from any delivery vehicle that acts to assist, promote, or facilitate entry into the cell, including viral sequences, viral particles, liposome formulations, lipofectin or precipitating agents and the like. However, the polynucleotides of the present invention may also be delivered in liposome formulations (such as those taught in Felgner P. L. et al. (1995) Ann. NY Acad. Sci. 772:126-139 and Abdallah B. et al. (1995) Biol. Cell 85(1):1-7) which can be prepared by methods well known to those skilled in the art.

[1097] The polynucleotide vector constructs used in the gene therapy method are preferably constructs that will not integrate into the host genome nor will they contain sequences that allow for replication. Any strong promoter known to those skilled in the art can be used for driving the expression of DNA. Unlike other gene therapy techniques, one major advantage of introducing naked nucleic acid sequences into target cells is the transitory nature of the polynucleotide synthesis in the cells. Studies have shown that non-replicating DNA sequences can be introduced into cells to provide production of the desired polypeptide for periods of up to six months.

[1098] The polynucleotide construct can be delivered to the interstitial space of tissues within an animal, including muscle, skin, brain, lung, liver, spleen, bone marrow, thymus, heart, lymph, blood, bone, cartilage, pancreas, kidney, gall bladder, stomach, intestine, testis, ovary, uterus, rectum, nervous system, eye, gland, and connective tissue. Interstitial space of the tissues comprises the intercellular fluid, mucopolysaccharide matrix among the reticular fibers of organ tissues, elastic fibers in the walls of vessels or chambers, collagen fibers of fibrous tissues, or that same matrix within connective tissue ensheathing muscle cells or in the lacunae of bone. It is similarly the space occupied by the plasma of the circulation and the lymph fluid of the lymphatic channels. Delivery to the interstitial space of muscle tissue is preferred for the reasons discussed below. They may be conveniently delivered by injection into the tissues comprising these cells. They are preferably delivered to and expressed in persistent, non-dividing cells which are differentiated, although delivery and expression may be achieved in non-differentiated or less completely differentiated cells, such as, for example, stem cells of blood or skin fibroblasts. In vivo muscle cells are particularly competent in their ability to take up and express polynucleotides.

[1099] For the naked polynucleotide injection, an effective dosage amount of DNA or RNA will be in the range of from about 0.05 g/kg body weight to about 50 mg/kg body weight. Preferably the dosage will be from about 0.005 mg/kg to about 20 mg/kg and more preferably from about 0.05 mg/kg to about 5 mg/kg. Of course, as the artisan of ordinary skill will appreciate, this dosage will vary according to the tissue site of injection. The appropriate and effective dosage of nucleic acid sequence can readily be determined by those of ordinary skill in the art and may depend on the condition being treated and the route of administration. The preferred route of administration is by the parenteral route of injection into the interstitial space of tissues. However, other parenteral routes may also be used, such as, inhalation of an aerosol formulation particularly for delivery to lungs or bronchial tissues, throat or mucous membranes of the nose. In addition, naked polynucleotide constructs can be delivered to arteries during angioplasty by the catheter used in the procedure.

[1100] The dose response effects of injected polynucleotide in muscle in vivo is determined as follows. Suitable template DNA for production of mRNA coding for polypeptide of the present invention is prepared in accordance with a standard recombinant DNA methodology. The template DNA, which may be either circular or linear, is either used as naked DNA or complexed with liposomes. The quadriceps muscles of mice are then injected with various amounts of the template DNA.

[1101] Five to six week old female and male Balb/C mice are anesthetized by intraperitoneal injection with 0.3 ml of 2.5% Avertin. A 1.5 cm incision is made on the anterior thigh, and the quadriceps muscle is directly visualized. The template DNA is injected in 0. 1 ml of carrier in a I cc syringe through a 27 gauge needle over one minute, approximately 0.5 cm from the distal insertion site of the muscle into the knee and about 0.2 cm deep. A suture is placed over the injection site for future localization, and the skin is closed with stainless steel clips.

[1102] After an appropriate incubation time (e.g., 7 days) muscle extracts are prepared by excising the entire quadriceps. Every fifth 15 um cross-section of the individual quadriceps muscles is histochemically stained for protein expression. A time course for protein expression may be done in a similar fashion except that quadriceps from different mice are harvested at different times. Persistence of DNA in muscle following injection may be determined by Southern blot analysis after preparing total cellular DNA and HIRT supernatants from injected and control mice. The results of the above experimentation in mice can be used to extrapolate proper dosages and other treatment parameters in humans and other animals using naked DNA.

### Example 19

### Transgenic Animals

[1103] The polypeptides of the invention can also be expressed in transgenic animals. Animals of any species, including, but not limited to, mice, rats, rabbits, hamsters, guinea pigs, pigs, micro-pigs, goats, sheep, cows and non-human primates, e.g., baboons, monkeys, and chimpanzees may be used to generate transgenic animals. In a specific embodiment, techniques described herein or otherwise known in the art, are used to express polypeptides of the invention in humans, as part of a gene therapy protocol.

[1104] Any technique known in the art may be used to introduce the transgene (i.e., polynucleotides of the invention) into animals to produce the founder lines of transgenic animals. Such techniques include, but are not limited to, pronuclear microinjection (Paterson et al., Appl. Microbiol. Biotechnol. 40:691-698 (1994); Carver et al., Biotechnology (NY) 11:1263-1270 (1993); Wright et al., Biotechnology (NY) 9:830-834 (1991); and Hoppe et al., U.S. Pat. No. 4,873,191 (1989)); retrovirus mediated gene transfer into germ lines (Van der Putten et al., Proc. Natl. Acad. Sci., USA 82:6148-6152 (1985)), blastocysts or embryos; gene targeting in embryonic stem cells (Thompson et al., Cell 56:313-321 (1989)); electroporation of cells or embryos (Lo, 1983, Mol Cell. Biol. 3:1803-1814 (1983)); introduction of the polynucleotides of the invention using a gene gun (see, e.g., Ulmer et al., Science 259:1745 (1993); introducing nucleic acid constructs into embryonic pleuripotent stem cells and transferring the stem cells back into the blastocyst; and sperm-mediated gene transfer (Lavitrano et al., Cell 57:717-723 (1989); etc. For a review of such techniques, see Gordon, “Transgenic Animals,” Intl. Rev. Cytol. 115:171-229 (1989), which is incorporated by reference herein in its entirety.

[1105] Any technique known in the art may be used to produce transgenic clones containing polynucleotides of the invention, for example, nuclear transfer into enucleated oocytes of nuclei from cultured embryonic, fetat, or adult cells induced to quiescence (Campell et al., Nature 380:64-66 (1996); Wilmut et al., Nature 385:810-813 (1997)).

[1106] The present invention provides for transgenic animals that carry the transgene in all their cells, as well as animals which carry the transgene in some, but not all their cells, i.e., mosaic animals or chimeric. The transgene may be integrated as a single transgene or as multiple copies such as in concatamers, e.g., head-to-head tandems or head-to-tail tandems. The transgene may also be selectively introduced into and activated in a particular cell type by following, for example, the teaching of Lasko et al. (Lasko et al., Proc. Natl. Acad. Sci. USA 89:6232-6236 (1992)). The regulatory sequences required for such a cell-type specific activation will depend upon the particular cell type of interest, and will be apparent to those of skill in the art. When it is desired that the polynucleotide transgene be integrated into the chromosomal site of the endogenous gene, gene targeting is preferred. Briefly, when such a technique is to be utilized, vectors containing some nucleotide sequences homologous to the endogenous gene are designed for the purpose of integrating, via homologous recombination with chromosomal sequences, into and disrupting the function of the nucleotide sequence of the endogenous gene. The transgene may also be selectively introduced into a particular cell type, thus inactivating the endogenous gene in only that cell type, by following, for example, the teaching of Gu et al. (Gu et al., Science 265:103-106 (1994)). The regulatory sequences required for such a cell-type specific inactivation will depend upon the particular cell type of interest, and will be apparent to those of skill in the art.

[1107] Once transgenic animals have been generated, the expression of the recombinant gene may be assayed utilizing standard techniques. Initial screening may be accomplished by Southern blot analysis or PCR techniques to analyze animal tissues to verify that integration of the transgene has taken place. The level of mRNA expression of the transgene in the tissues of the transgenic animals may also be assessed using techniques which include, but are not limited to, Northern blot analysis of tissue samples obtained from the animal, in situ hybridization analysis, and reverse transcriptase-PCR (rt-PCR). Samples of transgenic gene-expressing tissue may also be evaluated immunocytochemically or immunohistochemically using antibodies specific for the transgene product.

[1108] Once the founder animals are produced, they may be bred, inbred, outbred, or crossbred to produce colonies of the particular animal. Examples of such breeding strategies include, but are not limited to: outbreeding of founder animals with more than one integration site in order to establish separate lines; inbreeding of separate lines in order to produce compound transgenics that express the transgene at higher levels because of the effects of additive expression of each transgene; crossing of heterozygous transgenic animals to produce animals homozygous for a given integration site in order to both augment expression and eliminate the need for screening of animals by DNA analysis; crossing of separate homozygous lines to produce compound heterozygous or homozygous lines; and breeding to place the transgene on a distinct background that is appropriate for an experimental model of interest.

[1109] Transgenic animals of the invention have uses which include, but are not limited to, animal model systems useful in elaborating the biological function of polypeptides of the present invention, studying conditions and/or disorders associated with aberrant expression, and in screening for compounds effective in ameliorating such conditions and/or disorders.

### Example 20

### Knock-Out Animals

[1110] Endogenous gene expression can also be reduced by inactivating or “knocking out” the gene and/or its promoter using targeted homologous recombination. (See e.g., Smithies et al., Nature 317:230-234 (1985); Thomas & Capecchi, Cell 51:503-512 (1987); Thompson et al., Cell 5:313-321 (1989); each of which is incorporated by reference herein in its entirety.) For example, a mutant, non-functional polynucleotide of the invention (or a completely unrelated DNA sequence) flanked by DNA homologous to the endogenous polynucleotide sequence (either the coding regions or regulatory regions of the gene) can be used, with or without a selectable marker and/or a negative selectable marker, to transfect cells that express polypeptides of the invention in vivo. In another embodiment, techniques known in the art are used to generate knockouts in cells that contain, but do not express the gene of interest. Insertion of the DNA construct, via targeted homologous recombination, results in inactivation of the targeted gene. Such approaches are particularly suited in research and agricultural fields where modifications to embryonic stem cells can be used to generate animal offspring with an inactive targeted gene (e.g., see Thomas & Capecchi 1987 and Thompson 1989, supra). However this approach can be routinely adapted for use in humans provided the recombinant DNA constructs are directly administered or targeted to the required site in vivo using appropriate viral vectors that will be apparent to those of skill in the art.

[1111] In further embodiments of the invention, cells that are genetically engineered to express the polypeptides of the invention, or alternatively, that are genetically engineered not to express the polypeptides of the invention (e.g., knockouts) are administered to a patient in vivo. Such cells may be obtained from the patient (i.e., animal, including human) or an MHC compatible donor and can include, but are not limited to fibroblasts, bone marrow cells, blood cells (e.g., lymphocytes), adipocytes, muscle cells, endothelial cells etc. The cells are genetically engineered in vitro using recombinant DNA techniques to introduce the coding sequence of polypeptides of the invention into the cells, or alternatively, to disrupt the coding sequence and/or endogenous regulatory sequence associated with the polypeptides of the invention, e.g., by transduction (using viral vectors, and preferably vectors that integrate the transgene into the cell genome) or transfection procedures, including, but not limited to, the use of plasmids, cosmids, YACs, naked DNA, electroporation, liposomes, etc. The coding sequence of the polypeptides of the invention can be placed under the control of a strong constitutive or inducible promoter or promoter/enhancer to achieve expression, and preferably secretion, of the polypeptides of the invention. The engineered cells which express and preferably secrete the polypeptides of the invention can be introduced into the patient systemically, e.g., in the circulation, or intraperitoneally.

[1112] Alternatively, the cells can be incorporated into a matrix and implanted in the body, e.g., genetically engineered fibroblasts can be implanted as part of a skin graft; genetically engineered endothelial cells can be implanted as part of a lymphatic or vascular graft. (See, for example, Anderson et al. U.S. Pat. No. 5,399,349; and Mulligan & Wilson, U.S. Pat. No. 5,460,959 each of which is incorporated by reference herein in its entirety).

[1113] When the cells to be administered are non-autologous or non-MHC compatible cells, they can be administered using well known techniques which prevent the development of a host immune response against the introduced cells. For example, the cells may be introduced in an encapsulated form which, while allowing for an exchange of components with the immediate extracellular environment, does not allow the introduced cells to be recognized by the host immune system.

[1114] Transgenic and “knock-out” animals of the invention have uses which include, but are not limited to, animal model systems useful in elaborating the biological function of polypeptides of the present invention, studying conditions and/or disorders associated with aberrant expression, and in screening for compounds effective in ameliorating such conditions and/or disorders.

### Example 21

### Assays Detecting Stimulation or Inhibition of B Cell Proliferation and Differentiation

[1115] Generation of functional humoral immune responses requires both soluble and cognate signaling between B-lineage cells and their microenvironment. Signals may impart a positive stimulus that allows a B-lineage cell to continue its programmed development, or a negative stimulus that instructs the cell to arrest its current developmental pathway. To date, numerous stimulatory and inhibitory signals have been found to influence B cell responsiveness including IL-2, IL-4, IL-5, IL-6, IL-7, IL10, IL-13, IL-14 and IL-15. Interestingly, these signals are by themselves weak effectors but can, in combination with various co-stimulatory proteins, induce activation, proliferation, differentiation, homing, tolerance and death among B cell populations.

[1116] One of the best studied classes of B-cell co-stimulatory proteins is the TNF-superfamily. Within this family CD40, CD27, and CD30 along with their respective ligands CD154, CD70, and CD153 have been found to regulate a variety of immune responses. Assays which allow for the detection and/or observation of the proliferation and differentiation of these B-cell populations and their precursors are valuable tools in determining the effects various proteins may have on these B-cell populations in terms of proliferation and differentiation. Listed below are two assays designed to allow for the detection of the differentiation, proliferation, or inhibition of B-cell populations and their precursors.

[1117] In vitro Assay—Agonists or antagonists of the invention can be assessed for its ability to induce activation, proliferation, differentiation or inhibition and/or death in B-cell populations and their precursors. The activity of the agonists or antagonists of the invention on purified human tonsillar B cells, measured qualitatively over the dose range from 0.1 to 10,000 ng/mL, is assessed in a standard B-lymphocyte co-stimulation assay in which purified tonsillar B cells are cultured in the presence of either formalin-fixed Staphylococcus aureus Cowan I (SAC) or immobilized anti-human IgM antibody as the priming agent. Second signals such as IL-2 and IL-15 synergize with SAC and IgM crosslinking to elicit B cell proliferation as measured by tritiated-thymidine incorporation. Novel synergizing agents can be readily identified using this assay. The assay involves isolating human tonsillar B cells by magnetic bead (MACS) depletion of CD3-positive cells. The resulting cell population is greater than 95% B cells as assessed by expression of CD45R(B220).

[1118] Various dilutions of each sample are placed into individual wells of a 96-well plate to which are added 105 B-cells suspended in culture medium (RPMI 1640 containing 10% FBS, 5×10⁻⁵M 2ME, 100U/ml penicillin, 10 ug/ml streptomycin, and 10⁻⁵ dilution of SAC) in a total volume of 150 ul. Proliferation or inhibition is quantitated by a 20 h pulse (1 uCi/well) with 3H-thymidine (6.7 Ci/mM) beginning 72 h post factor addition. The positive and negative controls are IL2 and medium respectively.

[1119] In Vivo Assay—BALB/c mice are injected (i.p.) twice per day with buffer only, or 2 mg/Kg of agonists or antagonists of the invention, or truncated forms thereof. Mice receive this treatment for 4 consecutive days, at which time they are sacrificed and various tissues and serum collected for analyses. Comparison of H&E sections from normal spleens and spleens treated with agonists or antagonists of the invention identify the results of the activity of the agonists or antagonists on spleen cells, such as the diffusion of peri-arterial lymphatic sheaths, and/or significant increases in the nucleated cellularity of the red pulp regions, which may indicate the activation of the differentiation and proliferation of B-cell populations. Immunohistochemical studies using a B cell marker, anti-CD45R(B220), are used to determine whether any physiological changes to splenic cells, such as splenic disorganization, are due to increased B-cell representation within loosely defined B-cell zones that infiltrate established T-cell regions.

[1120] Flow cytometric analyses of the spleens from mice treated with agonist or antagonist is used to indicate whether the agonists or antagonists specifically increases the proportion of ThB+, CD45R(B220)dull B cells over that which is observed in control mice.

[1121] Likewise, a predicted consequence of increased mature B-cell representation in vivo is a relative increase in serum Ig titers. Accordingly, serum IgM and IgA levels are compared between buffer and agonists or antagonists-treated mice.

[1122] The studies described in this example tested activity of agonists or antagonists of the invention. However, one skilled in the art could easily modify the exemplified studies to test the activity of polynucleotides or polypeptides of the invention (e.g., gene therapy).

### Example 22

### T Cell Proliferation Assay

[1123] A CD3-induced proliferation assay is performed on PBMCs and is measured by the uptake of ³H-thymidine. The assay is performed as follows. Ninety-six well plates are coated with 100 μl/well of mAb to CD3 (HIT3a, Pharmingen) or isotype-matched control mAb (B33.1) overnight at 4 degrees C. (1 μg/ml in 0.05M bicarbonate buffer, pH 9.5), then washed three times with PBS. PBMC are isolated by F/H gradient centrifugation from human peripheral blood and added to quadruplicate wells (5×10⁴/well) of mAb coated plates in RPMI containing 10% FCS and P/S in the presence of varying concentrations of agonists or antagonists of the invention (total volume 200 ul). Relevant protein buffer and medium alone are controls. After 48 hr. culture at 37 degrees C., plates are spun for 2 min. at 1000 rpm and 100 μl of supernatant is removed and stored −20 degrees C. for measurement of IL-2 (or other cytokines) if effect on proliferation is observed. Wells are supplemented with 100 ul of medium containing 0.5 uCi of ³H-thymidine and cultured at 37 degrees C. for 18-24 hr. Wells are harvested and incorporation of ³H-thymidine used as a measure of proliferation. Anti-CD3 alone is the positive control for proliferation. IL-2 (100 U/ml) is also used as a control which enhances proliferation. Control antibody which does not induce proliferation of T cells is used as the negative control for the effects of agonists or antagonists of the invention.

[1124] The studies described in this example tested activity of agonists or antagonists of the invention. However, one skilled in the art could easily modify the exemplified studies to test the activity of polynucleotides or polypeptides of the invention (e.g., gene therapy).

### Example 23

### Effect of Agonists or Antagonists of the Invention on the Expression of MHC Class II, Costimulatory and Adhesion Molecules and Cell Differentiation of Monocytes and Monocyte-Derived Human Dendritic Cells

[1125] Dendritic cells are generated by the expansion of proliferating precursors found in the peripheral blood: adherent PBMC or elutriated monocytic fractions are cultured for 7-10 days with GM-CSF (50 ng/ml) and IL-4 (20 ng/ml). These dendritic cells have the characteristic phenotype of immature cells (expression of CD I, CD80, CD86, CD40 and MHC class II antigens). Treatment with activating factors, such as TNF-a, causes a rapid change in surface phenotype (increased expression of MHC class I and II, costimulatory and adhesion molecules, downregulation of FCγRII, upregulation of CD83). These changes correlate with increased antigen-presenting capacity and with functional maturation of the dendritic cells.

[1126] FACS analysis of surface antigens is performed as follows. Cells are treated 1-3 days with increasing concentrations of agonist or antagonist of the invention or LPS (positive control), washed with PBS containing 1% BSA and 0.02 mM sodium azide, and then incubated with 1:20 dilution of appropriate FITC- or PE-labeled monoclonal antibodies for 30 minutes at 4 degrees C. After an additional wash, the labeled cells are analyzed by flow cytometry on a FACScan (Becton Dickinson).

[1127] Effect on the production of cytokines. Cytokines generated by dendritic cells, in particular IL-12, are important in the initiation of T-cell dependent immune responses. IL-12 strongly influences the development of Th1 helper T-cell immune response, and induces cytotoxic T and NK cell function. An ELISA is used to measure the IL-12 release as follows. Dendritic cells (10⁶/ml) are treated with increasing concentrations of agonists or antagonists of the invention for 24 hours. LPS (100 ng/ml) is added to the cell culture as positive control. Supernatants from the cell cultures are then collected and analyzed for IL-12 content using commercial ELISA kit (e.g., R & D Systems (Minneapolis, Minn.)). The standard protocols provided with the kits are used.

[1128] Effect on the expression of MHC Class II costimulatory and adhesion molecules. Three major families of cell surface antigens can be identified on monocytes: adhesion molecules, molecules involved in antigen presentation, and Fc receptor. Modulation of the expression of MHC class II antigens and other costimulatory molecules, such as B7 and ICAM-1, may result in changes in the antigen presenting capacity of monocytes and ability to induce T cell activation. Increased expression of Fc receptors may correlate with improved monocyte cytotoxic activity, cytokine release and phagocytosis.

[1129] FACS analysis is used to examine the surface antigens as follows. Monocytes are treated 1-5 days with increasing concentrations of agonists or antagonists of the invention or LPS (positive control), washed with PBS containing 1% BSA and 0.02 mM sodium azide, and then incubated with 1:20 dilution of appropriate FITC- or PE-labeled monoclonal antibodies for 30 minutes at 4 degrees C. After an additional wash, the labeled cells are analyzed by flow cytometry on a FACScan (Becton Dickinson).

[1130] Monocyte activation and/or increased survival. Assays for molecules that activate (or alternatively, inactivate) monocytes and/or increase monocyte survival (or alternatively, decrease monocyte survival) are known in the art and may routinely be applied to determine whether a molecule of the invention functions as an inhibitor or activator of monocytes. Agonists or antagonists of the invention can be screened using the three assays described below. For each of these assays, Peripheral blood mononuclear cells (PBMC) are purified from single donor leukopacks (American Red Cross, Baltimore, Md.) by centrifugation through a Histopaque gradient (Sigma). Monocytes are isolated from PBMC by counterflow centrifugal elutriation.

[1131] Monocyte Survival Assay. Human peripheral blood monocytes progressively lose viability when cultured in absence of serum or other stimuli. Their death results from internally regulated processes (apoptosis). Addition to the culture of activating factors, such as TNF-alpha dramatically improves cell survival and prevents DNA fragmentation. Propidium iodide (PI) staining is used to measure apoptosis as follows. Monocytes are cultured for 48 hours in polypropylene tubes in serum-free medium (positive control), in the presence of 100 ng/ml TNF-alpha (negative control), and in the presence of varying concentrations of the compound to be tested. Cells are suspended at a concentration of 2×10⁶/ml in PBS containing PI at a final concentration of 5 μg/ml, and then incubated at room temperature for 5 minutes before FACScan analysis. PI uptake has been demonstrated to correlate with DNA fragmentation in this experimental paradigm.

[1132] Effect on cytokine release. An important function of monocytes/macrophages is their regulatory activity on other cellular populations of the immune system through the release of cytokines after stimulation. An ELISA to measure cytokine release is performed as follows. Human monocytes are incubated at a density of 5×10⁵ cells/ml with increasing concentrations of agonists or antagonists of the invention and under the same conditions, but in the absence of agonists or antagonists. For IL-12 production, the cells are primed overnight with IFN (100 U/ml) in the presence of agonist or antagonist of the invention. LPS (10 ng/ml) is then added. Conditioned media are collected after 24 h and kept frozen until use. Measurement of TNF-alpha, IL-10, MCP-1 and IL-S is then performed using a commercially available ELISA kit (e.g.; R & D Systems (Minneapolis, Minn.)) and applying the standard protocols provided with the kit.

[1133] Oxidative burst. Purified monocytes are plated in 96-w plate at 2-1×10⁵ cell/well. Increasing concentrations of agonists or antagonists of the invention are added to the wells in a total volume of 0.2 ml culture medium (RPMI 1640+10% FCS, glutamine and antibiotics). After 3 days incubation, the plates are centrifuged and the medium is removed from the wells. To the macrophage monolayers, 0.2 ml per well of phenol red solution (140 mM NaCl, 10 mM potassium phosphate buffer pH 7.0, 5.5 mM dextrose, 0.56 mM phenol red and 19 U/ml of HRPO) is added, together with the stimulant (200 nM PMA). The plates are incubated at 37° C. for 2 hours and the reaction is stopped by adding 20 μl 1N NaOH per well. The absorbance is read at 610 nm. To calculate the amount of H₂O₂ produced by the macrophages, a standard curve of a H₂O₂ solution of known molarity is performed for each experiment.

[1134] The studies described in this example tested activity of agonists or antagonists of the invention. However, one skilled in the art could easily modify the exemplified studies to test the activity of polynucleotides or polypeptides of the invention (e.g., gene therapy).

### Example 24

### Biological Effects of Agonists or Antagonists of the Invention

[1135] Astrocyte and Neuronal Assays.

[1136] Agonists or antagonists of the invention, expressed in Escherichica coli and purified as described above, can be tested for activity in promoting the survival, neurite outgrowth, or phenotypic differentiation of cortical neuronal cells and for inducing the proliferation of glial fibrillary acidic protein immunopositive cells, astrocytes. The selection of cortical cells for the bioassay is based on the prevalent expression of FGF-1 and FGF-2 in cortical structures and on the previously reported enhancement of cortical neuronal survival resulting from FGF-2 treatment. A thymidine incorporation assay, for example, can be used to elucidate an agonist or antagonist of the invention's activity on these cells.

[1137] Moreover, previous reports describing the biological effects of FGF-2 (basic FGF) on cortical or hippocampal neurons in vitro have demonstrated increases in both neuron survival and neurite outgrowth (Walicke et al., “Fibroblast growth factor promotes survival of dissociated hippocampal neurons and enhances neurite extension.” Proc. Natl. Acad. Sci. USA 83:3012-3016. (1986), assay herein incorporated by reference in its entirety). However, reports from experiments done on PC-12 cells suggest that these two responses are not necessarily synonymous and may depend on not only which FGF is being tested but also on which receptor(s) are expressed on the target cells. Using the primary cortical neuronal culture paradigm, the ability of an agonist or antagonist of the invention to induce neurite outgrowth can be compared to the response achieved with FGF-2 using, for example, a thymidine incorporation assay.

[1138] Fibroblast and Endothelial Cell Assays.

[1139] Human lung fibroblasts are obtained from Clonetics (San Diego, Calif.) and maintained in growth media from Clonetics. Dermal microvascular endothelial cells are obtained from Cell Applications (San Diego, Calif.). For proliferation assays, the human lung fibroblasts and dermal microvascular endothelial cells can be cultured at 5,000 cells/well in a 96-well plate for one day in growth medium. The cells are then incubated for one day in 0.1% BSA basal medium. After replacing the medium with fresh 0.1% BSA medium, the cells are incubated with the test proteins for 3 days. Alamar Blue (Alamar Biosciences, Sacramento, Calif.) is added to each well to a final concentration of 10%. The cells are incubated for 4 hr. Cell viablity is measured by reading in a CytoFluor fluorescence reader. For the PGE₂ assays, the human lung fibroblasts are cultured at 5,000 cells/well in a 96-well plate for one day. After a medium change to 0.1% BSA basal medium, the cells are incubated with FGF-2 or agonists or antagonists of the invention with or without IL-lI for 24 hours. The supernatants are collected and assayed for PGE₂ by EIA kit (Cayman, Ann Arbor, Mich.). For the IL-6 assays, the human lung fibroblasts are cultured at 5,000. cells/well in a 96-well plate for one day. After a medium change to 0.1% BSA basal medium, the cells are incubated with FGF-2 or with or without agonists or antagonists of the invention IL-1α for 24 hours. The supernatants are collected and assayed for IL-6 by ELISA kit (Endogen, Cambridge, Mass.).

[1140] Human lung fibroblasts are cultured with FGF-2 or agonists or antagonists of the invention for 3 days in basal medium before the addition of Alamar Blue to assess effects on growth of the fibroblasts. FGF-2 should show a stimulation at 10-2500 ng/ml which can be used to compare stimulation with agonists or antagonists of the invention.

[1141] Parkinson Models.

[1142] The loss of motor function in Parkinson's disease is attributed to a deficiency of striatal dopamine resulting from the degeneration of the nigrostriatal dopaminergic projection neurons. An animal model for Parkinson's that has been extensively characterized involves the systemic administration of 1-methyl-4 phenyl 1,2,3,6-tetrahydropyridine (MPTP). In the CNS, MPTP is taken-up by astrocytes and catabolized by monoamine oxidase B to 1-methyl-4-phenyl pyridine (MPP⁺) and released. Subsequently, MPP⁺ is actively accumulated in dopaminergic neurons by the high-affinity reuptake transporter for dopamine. MPP⁺ is then concentrated in mitochondria by the electrochemical gradient and selectively inhibits nicotidamide adenine disphosphate: ubiquinone oxidoreductionase (complex I), thereby interfering with electron transport and eventually generating oxygen radicals.

[1143] It has been demonstrated in tissue culture paradigms that FGF-2 (basic FGF) has trophic activity towards nigral dopaminergic neurons (Ferrari et al., Dev. Biol. 1989). Recently, Dr. Unsicker's group has demonstrated that administering FGF-2 in gel foam implants in the striatum results in the near complete protection of nigral dopaminergic neurons from the toxicity associated with MPTP exposure (Otto and Unsicker, J. Neuroscience, 1990).

[1144] Based on the data with FGF-2, agonists or antagonists of the invention can be evaluated to determine whether it has an action similar to that of FGF-2 in enhancing dopaminergic neuronal survival in vitro and it can also be tested in vivo for protection of dopaminergic neurons in the striatum from the damage associated with MPTP treatment. The potential effect of an agonist or antagonist of the invention is first examined in vitro in a dopaminergic neuronal cell culture paradigm. The cultures are prepared by dissecting the midbrain floor plate from gestation day 14 Wistar rat embryos. The tissue is dissociated with trypsin and seeded at a density of 200,000 cells/cm² on polyorthinine-laminin coated glass coverslips. The cells are maintained in Dulbecco's Modified Eagle's medium and F 12 medium containing hormonal supplements (N1). The cultures are fixed with paraformaldehyde after 8 days in vitro and are processed for tyrosine hydroxylase, a specific marker for dopaminergic neurons, immunohistochemical staining. Dissociated cell cultures are prepared from embryonic rats. The culture medium is changed every third day and the factors are also added at that time.

[1145] Since the dopaminergic neurons are isolated from animals at gestation day 14, a developmental time which is past the stage when the dopaminergic precursor cells are proliferating, an increase in the number of tyrosine hydroxylase immunopositive neurons would represent an increase in the number of dopaminergic neurons surviving in vitro. Therefore, if an agonist or antagonist of the invention acts to prolong the survival of dopaminergic neurons, it would suggest that the agonist or antagonist may be involved in Parkinson's Disease.

[1146] The studies described in this example tested activity of agonists or antagonists of the invention. However, one skilled in the art could easily modify the exemplified studies to test the activity of polynucleotides or polypeptides of the invention (e.g., gene therapy).

### Example 25

### The Effect of Agonists or Antagonists of the Invention on the Growth of Vascular Endothelial Cells

[1147] On day 1, human umbilical vein endothelial cells (HUVEC) are seeded at 2-5×10⁴ cells/35 mm dish density in M199 medium containing 4% fetal bovine serum (FBS), 16 units/ml heparin, and 50 units/ml endothelial cell growth supplements (ECGS, Biotechnique, Inc.). On day 2, the medium is replaced with M199 containing 10% FBS, 8 units/ml heparin. An agonist or antagonist of the invention, and positive controls, such as VEGF and basic FGF (bFGF) are added, at varying concentrations. On days 4 and 6, the medium is replaced. On day 8, cell number is determined with a Coulter Counter.

[1148] An increase in the number of HUVEC cells indicates that the compound of the invention may proliferate vascular endothelial cells, while a decrease in the number of HUVEC cells indicates that the compound of the invention inhibits vascular endothelial cells.

[1149] The studies described in this example tested activity of a polypeptide of the invention. However, one skilled in the art could easily modify the exemplified studies to test the activity of polynucleotides (e.g., gene therapy), agonists, and/or antagonists of the invention.

### Example 26

### Rat Corneal Wound Healing Model

[1150] This animal model shows the effect of an agonist or antagonist of the invention or neovascularization. The experimental protocol includes:

[1151] Making a 1-1.5 mm long incision from the center of cornea into the stromal layer.

[1152] Inserting a spatula below the lip of the incision facing the outer corner of the eye.

[1153] Making a pocket (its base is 1-1.5 mm form the edge of the eye).

[1154] Positioning a pellet, containing 50 ng-5 ug of an agonist or antagonist of the invention, within the pocket.

[1155] Treatment with an agonist or antagonist of the invention can also be applied topically to the corneal wounds in a dosage range of 20 mg-500 mg (daily treatment for five days).

[1156] The studies described in this example tested activity of agonists or antagonists of the invention. However, one skilled in the art could easily modify the exemplified studies to test the activity of polynucleotides or polypeptides of the invention (e.g., gene therapy).

### Example 27

### Diabetic Mouse and Glucocorticoid-Impaired Wound Healing Models

[1157] Diabetic db+/db+ Mouse Model.

[1158] To demonstrate that an agonist or antagonist of the invention accelerates the healing process, the genetically diabetic mouse model of wound healing is used. The full thickness wound healing model in the db+/db+ mouse is a well characterized, clinically relevant and reproducible model of impaired wound healing. Healing of the diabetic wound is dependent on formation of granulation tissue and re-epithelialization rather than contraction (Gartner, M. H. et al., J. Surg. Res. 52:389 (1992); Greenhalgh, D. G. et al., Am. J. Pathol. 136:1235 (1990)).

[1159] The diabetic animals have many of the characteristic features observed in Type II diabetes mellitus. Homozygous (db+/db+) mice are obese in comparison to their normal heterozygous (db+/+m) littermates. Mutant diabetic (db+/db+) mice have a single autosomal recessive mutation on chromosome 4 (db+) (Coleman et al. Proc. Natl. Acad. Sci. USA 77:283-293 (1982)). Animals show polyphagia, polydipsia and polyuria. Mutant diabetic mice (db+/db+) have elevated blood glucose, increased or normal insulin levels, and suppressed cell-mediated immunity (Mandel et al., J. Immunol. 120:1375 (1978); Debray-Sachs, M. et al., Clin. Exp. Immunol. 51(1):1-7 (1983); Leiter et al., Am. J. of Pathol. 114:46-55 (1985)). Peripheral neuropathy, myocardial complications, and microvascular lesions, basement membrane thickening and glomerular filtration abnormalities have been described in these animals (Norido, F. et al., Exp. Neurol. 83(2):221-232 (1984); Robertson et al., Diabetes 29(1):60-67 (1980); Giacomelli et al., Lab Invest. 40(4):460-473 (1979); Coleman, D. L., Diabetes 31 (Suppl):1-6 (1982)). These homozygous diabetic mice develop hyperglycemia that is resistant to insulin analogous to human type II diabetes (Mandel et al., J. Immunol. 120:1375-1377 (1978)).

[1160] The characteristics observed in these animals suggests that healing in this model may be similar to the healing observed in human diabetes (Greenhalgh, et al., Am. J. of Pathol. 136:1235-1246(1990)).

[1161] Genetically diabetic female C57BL/KsJ (db+/db+) mice and their non-diabetic (db+/+m) heterozygous littermates are used in this study (Jackson Laboratories). The animals are purchased at 6 weeks of age and are 8 weeks old at the beginning of the study. Animals are individually housed and received food and water ad libitum. All manipulations are performed using aseptic techniques. The experiments are conducted according to the rules and guidelines of Human Genome Sciences, Inc. Institutional Animal Care and Use Committee and the Guidelines for the Care and Use of Laboratory Animals.

[1162] Wounding protocol is performed according to previously reported methods (Tsuboi, R. and Rifkin, D. B., J. Exp. Med. 172:245-251 (1990)). Briefly, on the day of wounding, animals are anesthetized with an intraperitoneal injection of Avertin (0.01 mg/mL), 2,2,2-tribromoethanol and 2-methyl-2-butanol dissolved in deionized water. The dorsal region of the animal is shaved and the skin washed with 70% ethanol solution and iodine. The surgical area is dried with sterile gauze prior to wounding. An 8 mm full-thickness wound is then created using a Keyes tissue punch. Immediately following wounding, the surrounding skin is gently stretched to eliminate wound expansion. The wounds are left open for the duration of the experiment. Application of the treatment is given topically for 5 consecutive days commencing on the day of wounding. Prior to treatment, wounds are gently cleansed with sterile saline and gauze sponges.

[1163] Wounds are visually examined and photographed at a fixed distance at the day of surgery and at two day intervals thereafter. Wound closure is determined by daily measurement on days 1-5 and on day 8. Wounds are measured horizontally and vertically using a calibrated Jameson caliper. Wounds are considered healed if granulation tissue is no longer visible and the wound is covered by a continuous epithelium.

[1164] An agonist or antagonist of the invention is administered using at a range different doses, from 4 mg to 500 mg per wound per day for 8 days in vehicle. Vehicle control groups received 50 mL of vehicle solution.

[1165] Animals are euthanized on day 8 with an intraperitoneal injection of sodium pentobarbital (300 mg/kg). The wounds and surrounding skin are then harvested for histology and immunohistochemistry. Tissue specimens are placed in 10% neutral buffered formalin in tissue cassettes between biopsy sponges for further processing.

[1166] Three groups of 10 animals each (5 diabetic and 5 non-diabetic controls) are evaluated: 1) Vehicle placebo control, 2) untreated group, and 3) treated group.

[1167] Wound closure is analyzed by measuring the area in the vertical and horizontal axis and obtaining the total square area of the wound. Contraction is then estimated by establishing the differences between the initial wound area (day 0) and that of post treatment (day 8). The wound area on day I is 64 mm², the corresponding size of the dermal punch. Calculations are made using the following formula:

[Open area on day 8]−[Open area on day 1]/[Open area on day 1]

[1168] Specimens are fixed in 10% buffered formalin and paraffin embedded blocks are sectioned perpendicular to the wound surface (5 mm) and cut using a Reichert-Jung microtome. Routine hematoxylin-eosin (H&E) staining is performed on cross-sections of bisected wounds. Histologic examination of the wounds are used to assess whether the healing process and the morphologic appearance of the repaired skin is altered by treatment with an agonist or antagonist of the invention. This assessment included verification of the presence of cell accumulation, inflammatory cells, capillaries, fibroblasts, re-epithelialization and epidermal maturity (Greenhalgh, D. G. et al., Am. J. Pathol. 136:1235 (1990)). A calibrated lens micrometer is used by a blinded observer.

[1169] Tissue sections are also stained immunohistochemically with a polyclonal rabbit anti-human keratin antibody using ABC Elite detection system. Human skin is used as a positive tissue control while non-immune IgG is used as a negative control. Keratinocyte growth is determined by evaluating the extent of reepithelialization of the wound using a calibrated lens micrometer.

[1170] Proliferating cell nuclear antigen/cyclin (PCNA) in skin specimens is demonstrated by using anti-PCNA antibody (1:50) with an ABC Elite detection system. Human colon cancer served as a positive tissue control and human brain tissue is used as a negative tissue control. Each specimen included a section with omission of the primary antibody and substitution with non-immune mouse IgG. Ranking of these sections is on the extent of proliferation on a scale of 0-8, the lower side of the scale reflecting slight proliferation to the higher side reflecting intense proliferation.

[1171] Experimental data are analyzed using an unpaired t test. A p value of <0.05 is considered significant.

[1172] Steroid Impaired Rat Model

[1173] The inhibition of wound healing by steroids has been well documented in various in vitro and in vivo systems (Wahl, Glucocorticoids and Wound healing. In: Anti-Inflammatory Steroid Action: Basic and Clinical Aspects. 280-302 (1989); Wahlet al., J. Immunol. 115: 476-481 (1975); Werb et al., J. Exp. Med. 147:1684-1694 (1978)). Glucocorticoids retard wound healing by inhibiting angiogenesis, decreasing vascular permeability (Ebert et al., An. Intern. Med. 37:701-705 (1952)), fibroblast proliferation, and collagen synthesis (Beck et al., Growth Factors. 5: 295-304 (1991); Haynes et al., J. Clin. Invest. 61: 703-797 (1978)) and producing a transient reduction of circulating monocytes (Haynes et al., J. Clin. Invest. 61: 703-797 (1978); Wahl, “Glucocorticoids and wound healing”, In: Antiinflammatory Steroid Action: Basic and Clinical Aspects, Academic Press, New York, pp. 280-302 (1989)). The systemic administration of steroids to impaired wound healing is a well establish phenomenon in rats (Beck et al., Growth Factors. 5: 295-304 (1991); Haynes et al., J. Clin. Invest. 61: 703-797 (1978); Wahl, “Glucocorticoids and wound healing”, In: Antiinflammatory Steroid Action: Basic and Clinical Aspects, Academic Press, New York, pp. 280-302 (1989); Pierce et al., Proc. Natl. Acad. Sci. USA 86: 2229-2233 (1989)).

[1174] To demonstrate that an agonist or antagonist of the invention can accelerate the healing process, the effects of multiple topical applications of the agonist or antagonist on full thickness excisional skin wounds in rats in which healing has been impaired by the systemic administration of methylprednisolone is assessed.

[1175] Young adult male Sprague Dawley rats weighing 250-300 g (Charles River Laboratories) are used in this example. The animals are purchased at 8 weeks of age and are 9 weeks old at the beginning of the study. The healing response of rats is impaired by the systemic administration of methylprednisolone (17 mg/kg/rat intramuscularly) at the time of wounding. Animals are individually housed and received food and water ad libitum. All manipulations are performed using aseptic techniques. This study is conducted according to the rules and guidelines of Human Genome Sciences, Inc. Institutional Animal Care and Use Committee and the Guidelines for the Care and Use of Laboratory Animals.

[1176] The wounding protocol is followed according to section A, above. On the day of wounding, animals are anesthetized with an intramuscular injection of ketamine (50 mg/kg) and xylazine (5 mg/kg). The dorsal region of the animal is shaved and the skin washed with 70% ethanol and iodine solutions. The surgical area is dried with sterile gauze prior to wounding. An 8 mm full-thickness wound is created using a Keyes tissue punch. The wounds are left open for the duration of the experiment. Applications of the testing materials are given topically once a day for 7 consecutive days commencing on the day of wounding and subsequent to methylprednisolone administration. Prior to treatment, wounds are gently cleansed with sterile saline and gauze sponges.

[1177] Wounds are visually examined and photographed at a fixed distance at the day of wounding and at the end of treatment. Wound closure is determined by daily measurement on days 1-5 and on day 8. Wounds are measured horizontally and vertically using a calibrated Jameson caliper. Wounds are considered healed if granulation tissue is no longer visible and the wound is covered by a continuous epithelium.

[1178] The agonist or antagonist of the invention is administered using at a range different doses, from 4 mg to 500 mg per wound per day for 8 days in vehicle. Vehicle control groups received 50 mL of vehicle solution.

[1179] Animals are euthanized on day 8 with an intraperitoneal injection of sodium pentobarbital (300 mg/kg). The wounds and surrounding skin are then harvested for histology. Tissue specimens are placed in 10% neutral buffered formalin in tissue cassettes between biopsy sponges for further processing.

[1180] Three groups of 10 animals each (5 with methylprednisolone and 5 without glucocorticoid) are evaluated: 1) Untreated group 2) Vehicle placebo control 3) treated groups.

[1181] Wound closure is analyzed by measuring the area in the vertical and horizontal axis and obtaining the total area of the wound. Closure is then estimated by establishing the differences between the initial wound area (day 0) and that of post treatment (day 8). The wound area on day 1 is 64 mm², the corresponding size of the dermal punch. Calculations are made using the following formula:

[Open area on day 8]−[Open area on day 1]/[Open area on day 1]

[1182] Specimens are fixed in 10% buffered formmalin and paraffin embedded blocks are sectioned perpendicular to the wound surface (5 mm) and cut using an Olympus microtome. Routine hematoxylin-eosin (H&E) staining is performed on cross-sections of bisected wounds. Histologic examination of the wounds allows assessment of whether the healing process and the morphologic appearance of the repaired skin is improved by treatment with an agonist or antagonist of the invention. A calibrated lens micrometer is used by a blinded observer to determine the distance of the wound gap.

[1183] Experimental data are analyzed using an unpaired t test. A p value of <0.05 is considered significant.

[1184] The studies described in this example tested activity of agonists or antagonists of the invention. However, one skilled in the art could easily modify the exemplified studies to test the activity of polynucleotides or polypeptides of the invention (e.g., gene therapy).

### Example 28

### Lymphadema Animal Model

[1185] The purpose of this experimental approach is to create an appropriate and consistent lymphedema model for testing the therapeutic effects of an agonist or antagonist of the invention in lymphangiogenesis and re-establishment of the lymphatic circulatory system in the rat hind limb. Effectiveness is measured by swelling volume of the affected limb, quantification of the amount of lymphatic vasculature, total blood plasma protein, and histopathology. Acute lymphedema is observed for 7-10 days. Perhaps more importantly, the chronic progress of the edema is followed for up to 3-4 weeks.

[1186] Prior to beginning surgery, blood sample is drawn for protein concentration analysis. Male rats weighing approximately ˜350 g are dosed with Pentobarbital. Subsequently, the right legs are shaved from knee to hip. The shaved area is swabbed with gauze soaked in 70% EtOH. Blood is drawn for serum total protein testing. Circumference and volumetric measurements are made prior to injecting dye into paws after marking 2 measurement levels (0.5 cm above heel, at mid-pt of dorsal paw). The intradermal dorsum of both right and left paws are injected with 0.05 ml of 1% Evan's Blue. Circumference and volumetric measurements are then made following injection of dye into paws.

[1187] Using the knee joint as a landmark, a mid-leg inguinal incision is made circumferentially allowing the femoral vessels to be located. Forceps and hemostats are used to dissect and separate the skin flaps. After locating the femoral vessels, the lymphatic vessel that runs along side and underneath the vessel(s) is located. The main lymphatic vessels in this area are then electrically coagulated or suture ligated.

[1188] Using a microscope, muscles in back of the leg (near the semitendinosis and adductors) are bluntly dissected. The popliteal lymph node is then located. The 2 proximal and 2 distal lymphatic vessels and distal blood supply of the popliteal node are then ligated by suturing. The popliteal lymph node, and any accompanying adipose tissue, is then removed by cutting connective tissues.

[1189] Care is taken to control any mild bleeding resulting from this procedure. After lymphatics are occluded, the skin flaps are sealed by using liquid skin (Vetbond) (AJ Buck). The separated skin edges are seated to the underlying muscle tissue while leaving a gap of 0.5 cm around the leg. Skin also may be anchored by suturing to underlying muscle when necessary.

[1190] To avoid infection, animals are housed individually with mesh (no bedding). Recovering animals are checked daily through the optimal edematous peak, which typically occurred by day 5-7. The plateau edematous peak are then observed. To evaluate the intensity of the lymphedema, the circumference and volumes of 2 designated places on each paw before operation and daily for 7 days are measured. The effect of plasma proteins on lymphedema is determined and whether protein analysis is a useful testing perimeter is also investigated. The weights of both control and edematous limbs are evaluated at 2 places. Analysis is performed in a blind manner.

[1191] Circumference Measurements: Under brief gas anesthetic to prevent limb movement, a cloth tape is used to measure limb circumference. Measurements are done at the ankle bone and dorsal paw by 2 different people and those 2 readings are averaged. Readings are taken from both control and edematous limbs.

[1192] Volumetric Measurements: On the day of surgery, animals are anesthetized with Pentobarbital and are tested prior to surgery. For daily volumetrics animals are under brief halothane anesthetic (rapid immobilization and quick recovery), and both legs are shaved and equally marked using waterproof marker on legs. Legs are first dipped in water, then dipped into instrument to each marked level, then measured by Buxco edema software (Chen/Victor). Data is recorded by one person, while the other is dipping the limb to marked area.

[1193] Blood-plasma protein measurements: Blood is drawn, spun, and serum separated prior to surgery and then at conclusion for total protein and Ca2+ comparison.

[1194] Limb Weight Comparison: After drawing blood, the animal is prepared for tissue collection. The limbs are amputated using a quillitine, then both experimental and control legs are cut at the ligature and weighed. A second weighing is done as the tibio-cacaneal joint is disarticulated and the foot is weighed.

[1195] Histological Preparations: The transverse muscle located behind the knee (popliteal) area is dissected and arranged in a metal mold, filled with freezeGel, dipped into cold methylbutane, placed into labeled sample bags at −80EC until sectioning. Upon sectioning, the muscle is observed under fluorescent microscopy for lymphatics.

[1196] The studies described in this example tested activity of agonists or antagonists of the invention. However, one skilled in the art could easily modify the exemplified studies to test the activity of polynucleotides or polypeptides of the invention (e.g., gene therapy).

### Example 29

### Suppression of TNF Alpha-Induced Adhesion Molecule Expression by a Agonist or Antagonist of the Invention

[1197] The recruitment of lymphocytes to areas of inflammation and angiogenesis involves specific receptor-ligand interactions between cell surface adhesion molecules (CAMs) on lymphocytes and the vascular endotheliurn. The adhesion process, in both normal and pathological settings, follows a multi-step cascade that involves intercellular adhesion molecule-1 (ICAM-1), vascular cell adhesion molecule-1 (VCAM-1), and endothelial leukocyte adhesion molecule-1 (E-selectin) expression on endothelial cells (EC). The expression of these molecules and others on the vascular endothelium determines the efficiency with which leukocytes may adhere to the local vasculature and extravasate into the local tissue during the development of an inflammatory response. The local concentration of cytokines and growth factor participate in the modulation of the expression of these CAMs.

[1198] Tumor necrosis factor alpha (TNF-a), a potent proinflammatory cytokine, is a stimulator of all three CAMs on endothelial cells and may be involved in a wide variety of inflammatory responses, often resulting in a pathological outcome.

[1199] The potential of an agonist or antagonist of the invention to mediate a suppression of TNF-a induced CAM expression can be examined. A modified ELISA assay which uses ECs as a solid phase absorbent is employed to measure the amount of CAM expression on TNF-a treated ECs when co-stimulated with a member of the FGF family of proteins.

[1200] To perform the experiment, human umbilical vein endothelial cell (HUVEC) cultures are obtained from pooled cord harvests and maintained in growth medium (EGM-2; Clonetics, San Diego, Calif.) supplemented with 10% FCS and 1% penicillin/streptomycin in a 37 degree C. humidified incubator containing 5% CO₂. HUVECs are seeded in 96-well plates at concentrations of 1×10⁴ cells/well in EGM medium at 37 degree C. for 18-24 hrs or until confluent. The monolayers are subsequently washed 3 times with a serum-free solution of RPMI-1640 supplemented with 100 U/ml penicillin and 100 mg/ml streptomycin, and treated with a given cytokine and/or growth factor(s) for 24 h at 37 degree C. Following incubation, the cells are then evaluated for CAM expression.

[1201] Human Umbilical Vein Endothelial cells (HUVECs) are grown in a standard 96 well plate to confluence. Growth medium is removed from the cells and replaced with 90 ul of 199 Medium (10% FBS). Samples for testing and positive or negative controls are added to the plate in triplicate (in 10 ul volumes). Plates are incubated at 37 degree C. for either 5 h (selectin and integrin expression) or 24 h (integrin expression only). Plates are aspirated to remove medium and 100 μl of 0.1% paraformaldehyde-PBS (with Ca++ and Mg++) is added to each well. Plates are held at 4° C. for 30 min.

[1202] Fixative is then removed from the wells and wells are washed 1× with PBS(+Ca,Mg)+0.5% BSA and drained. Do not allow the wells to dry. Add 10 ill of diluted primary antibody to the test and control wells. Anti-ICAM-1-Biotin, Anti-VCAM-1-Biotin and Anti-E-selectin-Biotin are used at a concentration of 10 μg/ml (1:10 dilution of 0.1 mg/ml stock antibody). Cells are incubated at 37° C. for 30 min. in a humidified environment. Wells are washed ×3 with PBS(+Ca,Mg)+0.5% BSA.

[1203] Then add 20 μl of diluted ExtrAvidin-Alkaline Phosphotase (1:5,000 dilution) to each well and incubated at 37° C. for 30 min. Wells are washed ×3 with PBS(+Ca,Mg)+0.5% BSA. 1 tablet of p-Nitrophenol Phosphate pNPP is dissolved in 5 ml of glycine buffer (pH 10.4). 100 μl of pNPP substrate in glycine buffer is added to each test well. Standard wells in triplicate are prepared from the working dilution of the ExtrAvidin-Alkaline Phosphotase in glycine buffer: 1:5,000 (10⁰)>10^{-0.5}>10₋₁>10^{-1.5}. 5 μl of each dilution is added to triplicate wells and the resulting AP content in each well is 5.50 ng, 1.74 ng, 0.55 ng, 0.18 ng. 100 μl of pNNP reagent must then be added to each of the standard wells. The plate must be incubated at 37° C. for 4 h. A volume of 50 μl of 3M NaOH is added to all wells. The results are quantified on a plate reader at 405 nm. The background subtraction option is used on blank wells filled with glycine buffer only. The template is set up to indicate the concentration of AP-conjugate in each standard well [5.50 ng; 1.74 ng; 0.55 ng; 0.18 ng]. Results are indicated as amount of bound AP-conjugate in each sample.

[1204] The studies described in this example tested activity of agonists or antagonists of the invention. However, one skilled in the art could easily modify the exemplified studies to test the activity of polynucleotides or polypeptides of the invention (e.g., gene therapy).

### Example 30

### Production of Polypeptide of the Invention for High-Throughput Screening Assays

[1205] The following protocol produces a supernatant containing polypeptide of the present invention to be tested. This supernatant can then be used in the Screening Assays described in Examples 32-41.

[1206] First, dilute Poly-D-Lysine (644 587 Boehringer-Mannheim) stock solution (1 mg/ml in PBS) 1:20 in PBS (w/o calcium or magnesium 17-516F Biowhittaker) for a working solution of 50 ug/ml. Add 200 ul of this solution to each well (24 well plates) and incubate at RT for 20 minutes. Be sure to distribute the solution over each well (note: a 12-channel pipetter may be used with tips on every other channel). Aspirate off the Poly-D-Lysine solution and rinse with 1 ml PBS (Phosphate Buffered Saline). The PBS should remain in the well until just prior to plating the cells and plates may be poly-lysine coated in advance for up to two weeks.

[1207] Plate 293T cells (do not carry cells past P+20) at 2×10 cells/well in 0.5 ml DMEM (Dulbecco's Modified Eagle Medium) (with 4.5 G/L glucose and L-glutamine (12-604F Biowhittaker))/10% heat inactivated FBS (14-503F Biowhittaker)/1×Penstrep (17-602E Biowhittaker). Let the cells grow overnight.

[1208] The next day, mix together in a sterile solution basin: 300 ul Lipofectamine (18324-012 Gibco/BPL) and 5 ml Optimem 1 (31985070 Gibco/BRL)/96-well plate. With a small volume multi-channel pipetter, aliquot approximately 2 ug of an expression vector containing a polynucleotide insert, produced by the methods described in Examples 8-10, into an appropriately labeled 96-well round bottom plate. With a multi-channel pipetter, add 50 ul of the Lipofectamine/Optimem I mixture to each well. Pipette up and down gently to mix. Incubate at RT 15-45 minutes. After about 20 minutes, use a multi-channel pipetter to add 150 ul Optimem I to each well. As a control, one plate of vector DNA lacking an insert should be transfected with each set of transfections.

[1209] Preferably, the transfection should be performed by tag-teaming the following tasks. By tag-teaming, hands on time is cut in half, and the cells do not spend too much time on PBS. First, person A aspirates off the media from four 24-well plates of cells, and then person B rinses each well with 0.5-1 ml PBS. Person A then aspirates off PBS rinse, and person B, using a12-channel pipetter with tips on every other channel, adds the 200 ul of DNA/Lipofectamine/Optimem I complex to the odd wells first, then to the even wells, to each row on the 24-well plates. Incubate at 37 degree C. for 6 hours.

[1210] While cells are incubating, prepare appropriate media, either 1%BSA in DMEM with 1×penstrep, or HGS CHO-5 media (116.6 mg/L of CaCl2 (anhyd); 0.00130 mg/L CuSO4-5H2O; 0.050 mg/L of Fe(NO₃)₃-9H₂O; 0.417 mg/L of FeSO₄-7H₂O; 311.80 mg/L of Kcl; 28.64 mg/L of MgCl₂; 48.84 mg/L of MgSO4; 6995.50 mg/L of NaCl; 2400.0 mg/L of NaHCO₃; 62.50 mg/L of NaH₂PO₄—H₂O; 71.02 mg/L of Na₂HPO4; 0.4320 mg/L of ZnSO₄-7H₂O; 0.002 mg/L of Arachidonic Acid; 1.022 mg/L of Cholesterol; 0.070 mg/L of DL-alpha-Tocopherol-Acetate; 0.0520 mg/L of Linoteic Acid; 0.010 mg/L of Linolenic Acid; 0.010 mg/L of Myristic Acid; 0.010 mg/L of Oleic Acid; 0.010 mg/L of Palmitric Acid; 0.010 mg/L of Palmitic Acid; 100 mg/L of Pluronic F-68; 0.010 mg/L of Stearic Acid; 2.20 mg/L of Tween 80; 4551 mg/L of D-Glucose; 130.85 mg/ml of L-Alanine; 147.50 mg/ml of L-Arginine-HCL; 7.50 mg/ml of L-Asparagine-H₂0; 6.65 mg/ml of L-Aspartic Acid; 29.56 mg/ml of L-Cystine-2HCL-H₂O; 31.29 mg/ml of L-Cystine-2HCL; 7.35 mg/ml of L-Glutamic Acid; 365.0 mg/ml of L-Glutamine; 18.75 mg/ml of Glycine; 52.48 mg/ml of L-Histidine-HCL-H₂0; 106.97 mg/ml of L-Isoleucine; 111.45 mg/ml of L-Leucine; 163.75 mg/ml of L-Lysine HCL; 32.34 mg/ml of L-Methionine; 68.48 mg/ml of L-Phenylalainine; 40.0 mg/ml of L-Proline; 26.25 mg/ml of L-Serine; 101.05 mg/ml of L-Threonine; 19.22 mg/ml of L-Tryptophan; 91.79 mg/ml of L-Tryrosine-2Na-2H₂0; and 99.65 mg/ml of L-Valine; 0.0035 mg/L of Biotin; 3.24 mg/L of D-Ca Pantothenate; 11.78 mg/L of Choline Chloride; 4.65 mg/L of Folic Acid; 15.60 mg/L of i-Inositol; 3.02 mg/L of Niacinamide; 3.00 mg/L of Pyridoxal HCL; 0.031 mg/L of Pyridoxine HCL; 0.319 mg/L of Riboflavin; 3.17 mg/L of Thiamine HCL; 0.365 mg/L of Thymidine; 0.680 mg/L of Vitamin B₁₂; 25 mM of HEPES Buffer; 2.39 mg/L of Na Hypoxanthine; 0.105 mg/L of Lipoic Acid; 0.081 mg/L of Sodium Putrescine-2HCL; 55.0 mg/L of Sodium Pyruvate; 0.0067 mg/L of Sodium Selenite; 20 uM of Ethanolamine; 0.122 mg/L of Ferric Citrate; 41.70 mg/L of Methyl-B-Cyclodextrin complexed with Linoleic Acid; 33.33 mg/L of Methyl-B-Cyclodextrin complexed with Oteic Acid; 10 mg/L of Methyl-B-Cyclodextrin complexed with Retinal Acetate. Adjust osmolarity to 327 mOsm) with 2 mm glutamine and 1×penstrep. (BSA (81-068-3 Bayer) 100 gm dissolved in IL DMEM for a 10% BSA stock solution). Filter the media and collect 50 ul for endotoxin assay in 15 ml polystyrene conical.

[1211] The transfection reaction is terminated, preferably by tag-teaming, at the end of the incubation period. Person A aspirates off the transfection media, while person B adds 1.5 ml appropriate media to each well. Incubate at 37 degree C. for 45 or 72 hours depending on the media used: 1%BSA for 45 hours or CHO-5 for 72 hours.

[1212] On day four, using a 300 ul multichannel pipetter, aliquot 600 ul in one 1 ml deep well plate and the remaining supernatant into a 2 ml deep well. The supernatants from each well can then be used in the assays described in Examples 32-39.

[1213] It is specifically understood that when activity is obtained in any of the assays described below using a supernatant, the activity originates from either the polypeptide of the present invention directly (e.g., as a secreted protein) or by polypeptide of the present invention inducing expression of other proteins, which are then secreted into the supernatant. Thus, the invention further provides a method of identifying the protein in the supernatant characterized by an activity in a particular assay.

### Example 31

### Construction of GAS Reporter Construct

[1214] One signal transduction pathway involved in the differentiation and proliferation of cells is called the Jaks-STATs pathway. Activated proteins in the Jaks-STATs pathway bind to gamma activation site “GAS” elements or interferon-sensitive responsive element (“ISRE”), located in the promoter of many genes. The binding of a protein to these elements alter the expression of the associated gene.

[1215] GAS and ISRE elements are recognized by a class of transcription factors called Signal Transducers and Activators of Transcription, or “STATs.” There are six members of the STATs family. Stat1 and Stat3 are present in many cell types, as is Stat2 (as response to IFN-alpha is widespread). Stat4 is more restricted and is not in many cell types though it has been found in T helper class I, cells after treatment with IL-12. Stat5 was originally called mammary growth factor, but has been found at higher concentrations in other cells including myeloid cells. It can be activated in tissue culture cells by many cytokines.

[1216] The STATs are activated to translocate from the cytoplasm to the nucleus upon tyrosine phosphorylation by a set of kinases known as the Janus Kinase (“Jaks”) family. Jaks represent a distinct family of soluble tyrosine kinases and include Tyk2, Jak1, Jak2, and Jak3. These kinases display significant sequence similarity and are generally catalytically inactive in resting cells.

[1217] The Jaks are activated by a wide range of receptors summarized in the Table below. (Adapted from review by Schidler and Darneli, Ann. Rev. Biochem. 64:621-51 (1995).) A cytokine receptor family, capable of activating Jaks, is divided into two groups: (a) Class I includes receptors for IL-2, IL-3, IL-4, IL-6, IL-7, IL-9, IL-11, IL-12, IL-15, Epo, PRL, GH, G-CSF, GM-CSF, LIF, CNTF, and thrombopoietin; and (b) Class 2 includes IFN-a, IFN-g, and IL-10. The Class I receptors share a conserved cysteine motif (a set of four conserved cysteines and one tryptophan) and a WSXWS motif (a membrane proximal region encoding Trp-Ser-Xaa-Trp-Ser (SEQ ID NO:2)).

[1218] Thus, on binding of a ligand to a receptor, Jaks are activated, which in turn activate STATs, which then translocate and bind to GAS elements. This entire process is encompassed in the Jaks-STATs signal transduction pathway.

[1219] Therefore, activation of the Jaks-STATs pathway, reflected by the binding of the GAS or the ISRE element, can be used to indicate proteins involved in the proliferation and differentiation of cells. For example, growth factors and cytokines are known to activate the Jaks-STATs pathway. (See Table below.) Thus, by using GAS elements linked to reporter molecules, activators of the Jaks-STATs pathway can be identified.

| | | JAKs | | | | |
|---|---|---|---|---|---|---|
| Ligand | tyk2 | Jak1 | Jak2 | Jak3 | STATS | GAS(elements) or ISRE |
| IFN family | | | | | | |
| IFN-a/B | + | + | − | − | 1, 2, 3 | ISRE |
| IFN-g | | + | + | − | 1 | GAS (IRF1 > Lys6 > IFP) |
| Il-10 | + | ? | ? | − | 1, 3 | |
| gp130 family | | | | | | |
| IL-6 (Pleiotropic) | + | + | + | ? | 1, 3 | GAS (IRF1 > Lys6 > IFP) |
| Il-11(Pleiotropic) | ? | + | ? | ? | 1, 3 | |
| OnM(Pleiotropic) | ? | + | + | ? | 1, 3 | |
| LIF(Pleiotropic) | ? | + | + | ? | 1, 3 | |
| CNTF(Pleiotropic) | −/+ | + | + | ? | 1, 3 | |
| G-CSF(Pleiotropic) | ? | + | ? | ? | 1, 3 | |
| IL-12(Pleiotropic) | + | − | + | + | 1, 3 | |
| g-C family | | | | | | |
| IL-2 (lymphocytes) | − | + | − | + | 1, 3, 5 | GAS |
| IL-4 (lymph/myeloid) | − | + | − | + | 6 | GAS (IRF1 = IFP >> Ly6)(IgH) |
| IL-7 (lymphocytes) | − | + | − | + | 5 | GAS |
| IL-9 (lymphocytes) | − | + | − | + | 5 | GAS |
| IL-13 (lymphocyte) | − | + | ? | ? | 6 | GAS |
| IL-15 | ? | + | ? | + | 5 | GAS |
| gp140 family | | | | | | |
| IL-3 (myeloid) | − | − | + | − | 5 | GAS (IRF1 > IFP >> Ly6) |
| IL-5 (myeloid) | − | − | + | − | 5 | GAS |
| GM-CSF (myeloid) | − | − | + | − | 5 | GAS |
| Growth hormone family | | | | | | |
| GH | ? | − | + | − | 5 | |
| PRL | ? | +/− | + | − | 1, 3, 5 | |
| EPO | ? | − | + | − | 5 | GAS (B-CAS > IRF1 = IFP >> Ly6) |
| Receptor Tyrosine Kinases | | | | | | |
| EGF | ? | + | + | − | 1, 3 | GAS (IRF1) |
| PDGF | ? | + | + | − | 1, 3 | |
| CSF-1 | ? | + | + | − | 1, 3 | GAS (not IRF1) |

[1220] To construct a synthetic GAS containing promoter element, which is used in the Biological Assays described in Examples 32-33, a PCR based strategy is employed to generate a GAS-SV40 promoter sequence. The 5′ primer contains four tandem copies of the GAS binding site found in the IRFI promoter and previously demonstrated to bind STATs upon induction with a range of cytokines (Rothman et al., Immunity 1:457-468 (1994)), although other GAS or ISRE elements can be used instead. The 5′ primer also contains 18 bp of sequence complementary to the SV40 early promoter sequence and is flanked with an XhoI site. The sequence of the 5′ primer is:

(SEQ ID NO:3)

5′:GCGCCTCGAGATTTCCCCGAAATCTAGATTTCCCCGAAATGATTTCC
CCGAAATGATTTCCCCGAAATATCTGCCATCTCAATTAG:3′

[1221] The downstream primer is complementary to the SV40 promoter and is flanked with a Hind III site: 5′:GCGGCAAGCTTTTTGCAAAGCCTAGGC:3′ (SEQ ID NO:4)

[1222] PCR amplification is performed using the SV40 promoter template present in the B-gal:promoter plasmid obtained from Clontech. The resulting PCR fragment is digested with XhoI/Hind III and subcloned into BLSK2-(Stratagene). Sequencing with forward and reverse primers confirms that the insert contains the following sequence:

(SEQ ID NO:5)

5′:CTCGAGATTTCCCCGAAATCTAGATTTCCCCGAAATGATTTCCCCGA
AATGATTTCCCCGAAATATCTGCCATCTCAATTAGTCAGCAACCATAGTC
CCGCCCCTAACTCCGCCCATCCCGCCCCTAACTCCGCCCAGTTCCGCCCA
TTCTCCGCCCCATGGCTGACTAATTTTTTTTATTTATGCAGAGGCCGAGG
CCGCCTCGGCCTCTGAGCTATTCCAGAAGTAGTGAGGAGGCTTTTTTGGA
GGCCTAGGCTTTTGCAAAAAGCTT:3′

[1223] With this GAS promoter element linked to the SV40 promoter, a GAS:SEAP2 reporter construct is next engineered. Here, the reporter molecule is a secreted alkaline phosphatase, or “SEAP.” Clearly, however, any reporter molecule can be used instead of SEAP, in this or in any of the other Examples. Well known reporter molecules that can be used instead of SEAP include chloramphenicol acetyltransferase (CAT), luciferase, alkaline phosphatase, B-galactosidase, green fluorescent protein (GFP), or any protein detectable by an antibody.

[1224] The above sequence confirmed synthetic GAS-SV40 promoter element is subcloned into the pSEAP-Promoter vector obtained from Clontech using HindIII and XhoI, effectively replacing the SV40 promoter with the amplified GAS:SV40 promoter element, to create the GAS-SEAP vector. However, this vector does not contain a neomycin resistance gene, and therefore, is not preferred for mammalian expression systems.

[1225] Thus, in order to generate mammalian stable cell lines expressing the GAS-SEAP reporter, the GAS-SEAP cassette is removed from the GAS-SEAP vector using SalI and NotI, and inserted into a backbone vector containing the neomycin resistance gene, such as pGFP-1 (Clontech), using these restriction sites in the multiple cloning site, to create the GAS-SEAP/Neo vector. Once this vector is transfected into mammalian cells, this vector can then be used as a reporter molecule for GAS binding as described in Examples 32-33.

[1226] Other constructs can be made using the above description and replacing GAS with a different promoter sequence. For example, construction of reporter molecules containing NFK-B and EGR promoter sequences are described in Examples 34 and 35. However, many other promoters can be substituted using the protocols described in these Examples. For instance, SRE, IL-2, NFAT, or Osteocalcin promoters can be substituted, alone or in combination (e.g., GAS/NF-KB/EGR, GAS/NF-KB, Il-2/NFAT, or NF-KB/GAS). Similarly, other cell lines can be used to test reporter construct activity, such as HELA (epithelial), HUVEC (endothelial), Reh (B-cell), Saos-2 (osteoblast), HUVAC (aortic), or Cardiomyocyte.

### Example 32

### High-Throughput Screening Assay for T-Cell Activity

[1227] The following protocol is used to assess T-cell activity by identifying factors, and determining whether supernate containing a polypeptide of the invention proliferates and/or differentiates T-cells. T-cell activity is assessed using the GAS/SEAP/Neo construct produced in Example 31. Thus, factors that increase SEAP activity indicate the ability to activate the Jaks-STATS signal transduction pathway. The T-cell used in this assay is Jurkat T-cells (ATCC Accession No. TIB-152), although Molt-3 cells (ATCC Accession No. CRL-1552) and Molt-4 cells (ATCC Accession No. CRL-1582) cells can also be used.

[1228] Jurkat T-cells are lymphoblastic CD4+ Th1 helper cells. In order to generate stable cell lines, approximately 2 million Jurkat cells are transfected with the GAS-SEAP/neo vector using DMRIE-C (Life Technologies)(transfection procedure described below). The transfected cells are seeded to a density of approximately 20,000 cells per well and transfectants resistant to 1 mg/ml genticin selected. Resistant colonies are expanded and then tested for their response to increasing concentrations of interferon gamma. The dose response of a selected clone is demonstrated.

[1229] Specifically, the following protocol will yield sufficient cells for 75 wells containing 200 ul of cells. Thus, it is either scaled up, or performed in multiple to generate sufficient cells for multiple 96 well plates. Jurkat cells are maintained in RPMI+10% serum with 1%Pen-Strep. Combine 2.5 mls of OPTI-MEM (Life Technologies) with 10 ug of plasmid DNA in a T25 flask. Add 2.5 ml OPTI-MEM containing 50 ul of DMRIE-C and incubate at room temperature for 15-45 mins.

[1230] During the incubation period, count cell concentration, spin down the required number of cells (10⁷ per transfection), and resuspend in OPTI-MEM to a final concentration of 10⁷ cells/ml. Then add 1 ml of 1×10⁷ cells in OPTI-MEM to T25 flask and incubate at 37 degree C. for 6 hrs. After the incubation, add 10 ml of RPMI+15% serum.

[1231] The Jurkat:GAS-SEAP stable reporter lines are maintained in RPMI+10% serum, 1 mg/ml Genticin, and 1% Pen-Strep. These cells are treated with supernatants containing polypeptide of the present invention or polypeptide of the present invention induced polypeptides as produced by the protocol described in Example 30.

[1232] On the day of treatment with the supernatant, the cells should be washed and resuspended in fresh RPMI+10% serum to a density of 500,000 cells per ml. The exact number of cells required will depend on the number of supernatants being screened. For one 96 well plate, approximately 10 million cells (for 10 plates, 100 million cells) are required.

[1233] Transfer the cells to a triangular reservoir boat, in order to dispense the cells into a 96 well dish, using a 12 channel pipette. Using a 12 channel pipette, transfer 200 ul of cells into each well (therefore adding 100,000 cells per well).

[1234] After all the plates have been seeded, 50 ul of the supernatants are transferred directly from the 96 well plate containing the supernatants into each well using a 12 channel pipette. In addition, a dose of exogenous interferon gamma (0.1, 1.0, 10 ng) is added to wells H9, HIO, and Hi I to serve as additional positive controls for the assay.

[1235] The 96 well dishes containing Jurkat cells treated with supernatants are placed in an incubator for 48 hrs (note: this time is variable between 48-72 hrs). 35 ul samples from each well are then transferred to an opaque 96 well plate using a 12 channel pipette. The opaque plates should be covered (using sellophene covers) and stored at −20 degree C. until SEAP assays are performed according to Example 36. The plates containing the remaining treated cells are placed at 4 degree C. and serve as a source of material for repeating the assay on a specific well if desired.

[1236] As a positive control, 100 Unit/ml interferon gamma can be used which is known to activate Jurkat T cells. Over 30 fold induction is typically observed in the positive control wells.

[1237] The above protocol may be used in the generation of both transient, as well as stable, transfected cells, which would be apparent to those of skill in the art.

### Example 33

### High-Throughput Screening Assay Identifying Myeloid Activity

[1238] The following protocol is used to assess myeloid activity of polypeptide of the present invention by determining whether polypeptide of the present invention proliferates and/or differentiates myeloid cells. Myeloid cell activity is assessed using the GAS/SEAP/Neo construct produced in Example 31. Thus, factors that increase SEAP activity indicate the ability to activate the Jaks-STATS signal transduction pathway. The myeloid cell used in this assay is U937, a pre-monocyte cell line, although TF-1, HL60, or KG1 can be used.

[1239] To transiently transfect U937 cells with the GAS/SEAP/Neo construct produced in Example 31, a DEAE-Dextran method (Kharbanda et. al., 1994, Cell 7 Growth & Differentiation, 5:259-265) is used. First, harvest 2×10⁷ U937 cells and wash with PBS. The U937 cells are usually grown in RPMI 1640 medium containing 10% heat-inactivated fetal bovine serum (FBS) supplemented with 100 units/ml penicillin and 100 mg/ml streptomycin.

[1240] Next, suspend the cells in 1 ml of 20 mM Tris-HCl (pH 7.4) buffer containing 0.5 mg/ml DEAE-Dextran, 8 ug GAS-SEAP2 plasmid DNA, 140 mM NaCl, 5 mM KCl, 375 uM Na₂HPO₄.7H₂O, 1 mM MgCl₂, and 675 uM CaCl₂. Incubate at 37 degrees C. for 45 min.

[1241] Wash the cells with RPMI 1640 medium containing 10% FBS and then resuspend in 10 ml complete medium and incubate at 37 degree C. for 36 hr.

[1242] The GAS-SEAP/U937 stable cells are obtained by growing the cells in 400 ug/ml G418. The G418-free medium is used for routine growth but every one to two months, the cells should be re-grown in 400 ug/ml G418 for couple of passages.

[1243] These cells are tested by harvesting 1×10⁸ cells (this is enough for ten 96-well plates assay) and wash with PBS. Suspend the cells in 200 ml above described growth medium, with a final density of 5×10⁵ cells/ml. Plate 200 ul cells per well in the 96-well plate (or 1×10⁵ cells/well).

[1244] Add 50 ul of the supernatant prepared by the protocol described in Example 30. Incubate at 37 degee C for 48 to 72 hr. As a positive control, 100 Unit/ml interferon gamma can be used which is known to activate U937 cells. Over 30 fold induction is typically observed in the positive control wells. SEAP assay the supernatant according to the protocol described in Example 36.

### Example 34

### High-Throughput Screening Assay Identifying Neuronal Activity

[1245] When cells undergo differentiation and proliferation, a group of genes are activated through many different signal transduction pathways. One of these genes, EGR1 (early growth response gene 1), is induced in various tissues and cell types upon activation. The promoter of EGR1 is responsible for such induction. Using the EGR1 promoter linked to reporter molecules, activation of cells can be assessed by polypeptide of the present invention.

[1246] Particularly, the following protocol is used to assess neuronal activity in PC12 cell lines. PC12 cells (rat phenochromocytoma cells) are known to proliferate and/or differentiate by activation with a number of mitogens, such as TPA (tetradecanoyl phorbol acetate), NGF (nerve growth factor), and EGF (epidermal growth factor). The EGR1 gene expression is activated during this treatment. Thus, by stably transfecting PC12 cells with a construct containing an EGR promoter linked to SEAP reporter, activation of PC 12 cells by polypeptide of the present invention can be assessed.

[1247] The EGR/SEAP reporter construct can be assembled by the following protocol. The EGR-1 promoter sequence (−633 to +1)(Sakamoto K et al., Oncogene 6:867-871 (1991)) can be PCR amplified from human genomic DNA using the following primers:

(SEQ ID NO:6)

5′\GCGCTCGAGGGATGACAGCGATAGAACCCCGG-3′

(SEQ ID NO:7)

5′\GCGAAGCTTCGCGACTCCCCGGATCCGCCTC-3′

[1248] Using the GAS:SEAP/Neo vector produced in Example 31, EGR1 amplified product can then be inserted into this vector. Linearize the GAS:SEAP/Neo vector using restriction enzymes XhoI/HindIII, removing the GAS/SV40 stuffer. Restrict the EGR1 amplified product with these same enzymes. Ligate the vector and the EGR1 promoter.

[1249] To prepare 96 well-plates for cell culture, two mls of a coating solution (1:30 dilution of collagen type I (Upstate Biotech Inc. Cat#08-115) in 30% ethanol (filter sterilized)) is added per one 10 cm plate or 50 ml per well of the 96-well plate, and allowed to air dry for 2 hr.

[1250] PC12 cells are routinely grown in RPMI-1640 medium (Bio Whittaker) containing 10% horse serum (JRH BIOSCIENCES, Cat. # 12449-78P), 5% heat-inactivated fetal bovine serum (FBS) supplemented with 100 units/ml penicillin and 100 ug/ml streptomycin on a precoated 10 cm tissue culture dish. One to four split is done every three to four days. Cells are removed from the plates by scraping and resuspended with pipetting up and down for more than 15 times.

[1251] Transfect the EGR/SEAP/Neo construct into PC12 using the Lipofectamine protocol described in Example 30. EGR-SEAP/PC12 stable cells are obtained by growing the cells in 300 ug/ml G418. The G418-free medium is used for routine growth but every one to two months, the cells should be re-grown in 300 ug/ml G418 for couple of passages.

[1252] To assay for neuronal activity, a 10 cm plate with cells around 70 to 80% confluent is screened by removing the old medium. Wash the cells once with PBS (Phosphate buffered saline). Then starve the cells in low serum medium (RPMI-1640 containing 1% horse serum and 0.5% FBS with antibiotics) overnight.

[1253] The next morning, remove the medium and wash the cells with PBS. Scrape off the cells from the plate, suspend the cells well in 2 ml low serum medium. Count the cell number and add more low serum medium to reach final cell density as 5×10⁵ cells/ml.

[1254] Add 200 ul of the cell suspension to each well of 96-well plate (equivalent to 1×10⁵ cells/well). Add 50 ul supernatant produced by Example 30, 37 degree C. for 48 to 72 hr. As a positive control, a growth factor known to activate PC12 cells through EGR can be used, such as 50 ng/ul of Neuronal Growth Factor (NGF). Over fifty-fold induction of SEAP is typically seen in the positive control wells. SEAP assay the supernatant according to Example 36.

### Example 35

### High-Throughput Screening Assay for T-Cell Activity

[1255] NF-KB (Nuclear Factor KB) is a transcription factor activated by a wide variety of agents including the inflammatory cytokines IL-1 and TNF, CD30 and CD40, lymphotoxin-alpha and lymphotoxin-beta, by exposure to LPS or thrombin, and by expression of certain viral gene products. As a transcription factor, NF-KB regulates the expression of genes involved in immune cell activation, control of apoptosis (NF-KB appears to shield cells from apoptosis), B and T-cell development, anti-viral and antimicrobial responses, and multiple stress responses.

[1256] In non-stimulated conditions, NF-KB is retained in the cytoplasm with I-KB (Inhibitor KB). However, upon stimulation, I-KB is phosphorylated and degraded, causing NF-KB to shuttle to the nucleus, thereby activating transcription of target genes. Target genes activated by NF-KB include IL-2, IL-6, GM-CSF, ICAM-1 and class 1 MHC.

[1257] Due to its central role and ability to respond to a range of stimuli, reporter constructs utilizing the NF-KB promoter element are used to screen the supernatants produced in Example 30. Activators or inhibitors of NF-KB would be useful in treating, preventing, and/or diagnosing diseases. For example, inhibitors of NF-KB could be used to treat those diseases related to the acute or chronic activation of NF-KB, such as rheumatoid arthritis.

[1258] To construct a vector containing the NF-KB promoter element, a PCR based strategy is employed. The upstream primer contains four tandem copies of the NF-KB binding site (GGGGACTTTCCC) (SEQ ID NO:8), 18 bp of sequence complementary to the 5′ end of the SV40 early promoter sequence, and is flanked with an XhoI site:

(SEQ ID NO:9)

5′:GCGGCCTCGAGGGGACTTTCCCGGGGACTTTCCGGGGACTTTCCGGG
ACTTTCCATCCTGCCATCTCAATTAG:3′

[1259] The downstream primer is complementary to the 3′ end of the SV40 promoter and is flanked with a Hind III site:

[1260] 5′:GCGGCAAGCTTTTTGCAAAGCCTAGGC:3′ (SEQ ID NO:4)

[1261] PCR amplification is performed using the SV40 promoter template present in the pB-gal:promoter plasmid obtained from Clontech. The resulting PCR fragment is digested with XhoI and Hind III and subcloned into BLSK2-. (Stratagene) Sequencing with the T7 and T3 primers confirms the insert contains the following sequence:

(SEQ ID NO:10)

5′:CTCGAGGGGACTTTCCCGGGGACTTTCCGGGGACTTTCCGGGACTTT
CCATCTGCCATCTCAATTAGTCAGCAACCATAGTCCCGCCCCTAACTCCG
CCCATCCCGCCCCTAACTCCGCCCAGTTCCGCCCATTCTCCGCCCCATGG
CTGACTAATTTTTTTTATTTATGCAGAGGCCGAGGCCGCCTCGGCCTCTG
AGCTATTCCAGAAGTAGTGAGGAGGCTTTTTTGGAGGCCTAGGCTTTTGC
AAAAAGCTT:3′

[1262] Next, replace the SV40 minimal promoter element present in the pSEAP2-promoter plasmid (Clontech) with this NF-KB/SV40 fragment using XhoI and HindIII. However, this vector does not contain a neomycin resistance gene, and therefore, is not preferred for mammalian expression systems.

[1263] In order to generate stable mammalian cell lines, the NF-KB/SV40/SEAP cassette is removed from the above NF-KB/SEAP vector using restriction enzymes SalI and NotI, and inserted into a vector containing neomycin resistance. Particularly, the NF-KB/SV40/SEAP cassette was inserted into pGFP-1 (Clontech), replacing the GFP gene, after restricting pGFP-1 with SalI and NotI.

[1264] Once NF-KB/SV40/SEAP/Neo vector is created, stable Jurkat T-cells are created and maintained according to the protocol described in Example 32. Similarly, the method for assaying supernatants with these stable Jurkat T-cells is also described in Example 32. As a positive control, exogenous TNF alpha (0.1, 1, 10 ng) is added to wells H9, H10, and HI 1, with a 5-10 fold activation typically observed.

### Example 36

### Assay for SEAP Activity

[1265] As a reporter molecule for the assays described in Examples 32-35, SEAP activity is assayed using the Tropix Phospho-light Kit (Cat. BP-400) according to the following general procedure. The Tropix Phospho-light Kit supplies the Dilution, Assay, and Reaction Buffers used below.

[1266] Prime a dispenser with the 2.5×Dilution Buffer and dispense 15 ul of 2.5×dilution buffer into Optiplates containing 35 ul of a supernatant. Seat the plates with a plastic sealer and incubate at 65 degree C. for 30 min. Separate the Optiplates to avoid uneven heating.

[1267] Coot the samples to room temperature for 15 minutes. Empty the dispenser and prime with the Assay Buffer. Add 50 ml Assay Buffer and incubate at room temperature 5 min. Empty the dispenser and prime with the Reaction Buffer (see the Table below). Add 50 ul Reaction Buffer and incubate at room temperature for 20 minutes. Since the intensity of the chemiluminescent signal is time dependent, and it takes about 10 minutes to read 5 plates on a luminometer, thus one should treat 5 plates at each time and start the second set 10 minutes later.

[1268] Read the relative light unit in the luminometer. Set H12 as blank, and print the results. An increase in chemiluminescence indicates reporter activity.

Reaction Buffer Formulation:

| # of plates | Rxn buffer diluent (ml) | CSPD (ml) |
|---|---|---|
| 10 | 60 | 3 |
| 11 | 65 | 3.25 |
| 12 | 70 | 3.5 |
| 13 | 75 | 3.75 |
| 14 | 80 | 4 |
| 15 | 85 | 4.25 |
| 16 | 90 | 4.5 |
| 17 | 95 | 4.75 |
| 18 | 100 | 5 |
| 19 | 105 | 5.25 |
| 20 | 110 | 5.5 |
| 21 | 115 | 5.75 |
| 22 | 120 | 6 |
| 23 | 125 | 6.25 |
| 24 | 130 | 6.5 |
| 25 | 135 | 6.75 |
| 26 | 140 | 7 |
| 27 | 145 | 7.25 |
| 28 | 150 | 7.5 |
| 29 | 155 | 7.75 |
| 30 | 160 | 8 |
| 31 | 165 | 8.25 |
| 32 | 170 | 8.5 |
| 33 | 175 | 8.75 |
| 34 | 180 | 9 |
| 35 | 185 | 9.25 |
| 36 | 190 | 9.5 |
| 37 | 195 | 9.75 |
| 38 | 200 | 10 |
| 39 | 205 | 10.25 |
| 40 | 210 | 10.5 |
| 41 | 215 | 10.75 |
| 42 | 220 | 11 |
| 43 | 225 | 11.25 |
| 44 | 230 | 11.5 |
| 45 | 235 | 11.75 |
| 46 | 240 | 12 |
| 47 | 245 | 12.25 |
| 48 | 250 | 12.5 |
| 49 | 255 | 12.75 |
| 50 | 260 | 13 |

### Example 37

### High-Throughput Screening Assay Identifying Changes in Small Molecule Concentration and Membrane Permeability

[1269] Binding of a ligand to a receptor is known to alter intracellular levels of small molecules, such as calcium, potassium, sodium, and pH, as well as alter membrane potential. These alterations can be measured in an assay to identify supernatants which bind to receptors of a particular cell. Although the following protocol describes an assay for calcium, this protocol can easily be modified to detect changes in potassium, sodium, pH, membrane potential, or any other small molecule which is detectable by a fluorescent probe.

[1270] The following assay uses Fluorometric Imaging Plate Reader (“FLIPR”) to measure changes in fluorescent molecules (Molecular Probes) that bind small molecules. Clearly, any fluorescent molecule detecting a small molecule can be used instead of the calcium fluorescent molecule, fluo-4 (Molecular Probes, Inc.; catalog no. F-14202), used here.

[1271] For adherent cells, seed the cells at 10,000-20,000 cells/well in a Co-star black 96-well plate with clear bottom. The plate is incubated in a CO₂ incubator for 20 hours. The adherent cells are washed two times in Biotek washer with 200 ul of HBSS (Hank's Balanced Salt Solution) leaving 100 ul of buffer after the final wash.

[1272] A stock solution of 1 mg/ml fluo-4 is made in 10% pluronic acid DMSO. To load the cells with fluo-4, 50 ul of 12 ug/ml fluo-4 is added to each well. The plate is incubated at 37 degrees C. in a CO₂ incubator for 60 min. The plate is washed four times in the Biotek washer with HBSS leaving 100 ul of buffer.

[1273] For non-adherent cells, the cells are spun down from culture media. Cells are re-suspended to 2-5×10⁶ cells/ml with HBSS in a 50-ml conical tube. 4 ul of 1 mg/ml fluo-4 solution in 10% pluronic acid DMSO is added to each ml of cell suspension. The tube is then placed in a 37 degrees C. water bath for 30-60 min. The cells are washed twice with HBSS, resuspended to 1×10⁶ cells/ml, and dispensed into a microplate, 100 ul/well. The plate is centrifuged at 1000 rpm for 5 min. The plate is then washed once in Denley Cell Wash with 200 ul, followed by an aspiration step to 100 ul final volume.

[1274] For a non-cell based assay, each well contains a fluorescent molecule, such as fluo-4. The supernatant is added to the well, and a change in fluorescence is detected.

[1275] To measure the fluorescence of intracellular calcium, the FLIPR is set for the following parameters: (1) System gain is 300-800 mW; (2) Exposure time is 0.4 second; (3) Camera F/stop is F/2; (4) Excitation is 488 nm; (5) Emission is 530 nm; and (6) Sample addition is 50 ul. Increased emission at 530 nm indicates an extracellular signaling event caused by the a molecule, either polypeptide of the present invention or a molecule induced by polypeptide of the present invention, which has resulted in an increase in the intracellular Ca⁺⁺concentration.

### Example 38

### High-Throughput Screening Assay Identifying Tyrosine Kinase Activity

[1276] The Protein Tyrosine Kinases (PTK) represent a diverse group of transmembrane and cytoplasmic kinases. Within the Receptor Protein Tyrosine Kinase RPTK) group are receptors for a range of mitogenic and metabolic growth factors including-the PDGF, FGF, EGF, NGF, HGF and Insulin receptor subfamilies. In addition there are a large family of RPTKs for which the corresponding ligand is unknown. Ligands for RPTKs include mainly secreted small proteins, but also membrane-bound and extracellular matrix proteins.

[1277] Activation of RPTK by ligands involves ligand-mediated receptor dimerization, resulting in transphosphorylation of the receptor subunits and activation of the cytoplasmic tyrosine kinases. The cytoplasmic tyrosine kinases include receptor associated tyrosine kinases of the src-family (e.g., src, yes, Ick, lyn, fyn) and non-receptor linked and cytosolic protein tyrosine kinases, such as the Jak family, members of which mediate signal transduction triggered by the cytokine superfamily of receptors (e.g., the Interleukins, Interferons, GM-CSF, and Leptin).

[1278] Because of the wide range of known factors capable of stimulating tyrosine kinase activity, identifying whether polypeptide of the present invention or a molecule induced by polypeptide of the present invention is capable of activating tyrosine kinase signal transduction pathways is of interest. Therefore, the following protocol is designed to identify such molecules capable of activating the tyrosine kinase signal transduction pathways.

[1279] Seed target cells (e.g., primary keratinocytes) at a density of approximately 25,000 cells per well in a 96 well Loprodyne Silent Screen Plates purchased from Nalge Nunc (Naperville, Ill.). The plates are sterilized with two 30 minute rinses with 100% ethanol, rinsed with water and dried overnight. Some plates are coated for 2 hr with 100 ml of cell culture grade type I collagen (50 mg/ml), gelatin (2%) or polylysine (50 mg/ml), all of which can be purchased from Sigma Chemicals (St. Louis, Mo.) or 10% Matrigel purchased from Becton Dickinson (Bedford, Mass.), or calf serum, rinsed with PBS and stored at 4 degree C. Cell growth on these plates is assayed by seeding 5,000 cells/well in growth medium and indirect quantitation of cell number through use of alamarBlue as described by the manufacturer Alamar Biosciences, Inc. (Sacramento, Calif.) after 48 hr. Falcon plate covers #3071 from Becton Dickinson (Bedford, Mass.) are used to cover the Loprodyne Silent Screen Plates. Falcon Microtest III cell culture plates can also be used in some proliferation experiments.

[1280] To prepare extracts, A431 cells are seeded onto the nylon membranes of Loprodyne plates (20,000/200 ml/well) and cultured overnight in complete medium. Cells are quiesced by incubation in serum-free basal medium for 24 hr. After 5-20 minutes treatment with EGF (60 ng/ml) or 50 ul of the supernatant produced in Example 30, the medium was removed and 100 ml of extraction buffer ((20 mM HEPES pH 7.5, 0.15 M NaCl, 1% Triton X-100, 0.1% SDS, 2 mM Na3VO4, 2 mM Na4P2O7 and a cocktail of protease inhibitors (# 1836170) obtained from Boeheringer Mannheim (Indianapolis, Ind.)) is added to each well and the plate is shaken on a rotating shaker for 5 minutes at 4° C. The plate is then placed in a vacuum transfer manifold and the extract filtered through the 0.45 mm membrane bottoms of each well using house vacuum. Extracts are collected in a 96-well catch/assay plate in the bottom of the vacuum manifold and immediately placed on ice. To obtain extracts clarified by centrifugation, the content of each well, after detergent solubilization for 5 minutes, is removed and centrifuged for 15 minutes at 4 degree C. at 16,000×g.

[1281] Test the filtered extracts for levels of tyrosine kinase activity. Although many methods of detecting tyrosine kinase activity are known, one method is described here.

[1282] Generally, the tyrosine kinase activity of a supernatant is evaluated by determining its ability to phosphorylate a tyrosine residue on a specific substrate (a biotinylated peptide). Biotinylated peptides that can be used for this purpose include PSKI (corresponding to amino acids 6-20 of the cell division kinase cdc2-p34) and PSK2 (corresponding to amino acids 1-17 of gastrin). Both peptides are substrates for a range of tyrosine kinases and are available from Boehringer Mannheim.

[1283] The tyrosine kinase reaction is set up by adding the following components in order. First, add 10 ul of 5 uM Biotinylated Peptide, then 10 ul ATP/Mg₂₊ (5 mM ATP/50 mM MgCl₂), then 10 ul of 5×Assay Buffer (40 mM imidazole hydrochloride, pH 7.3, 40 mM beta-glycerophosphate, 1 mM EGTA, 100 mM MgCl₂, 5 mM MnCl₂, 0.5 mg/ml BSA), then 5 ul of Sodium Vanadate (1 mM), and then 5 ul of water. Mix the components gently and preincubate the reaction mix at 30 degree C. for 2 min. Initial the reaction by adding 10 ul of the control enzyme or the filtered supernatant.

[1284] The tyrosine kinase assay reaction is then terminated by adding 10 ul of 120 mm EDTA and place the reactions on ice.

[1285] Tyrosine kinase activity is determined by transferring 50 ul aliquot of reaction mixture to a microtiter plate (MTP) module and incubating at 37 degree C. for 20 min. This allows the streptavidin coated 96 well plate to associate with the biotinylated peptide. Wash the MTP module with 300 ul/well of PBS four times. Next add 75 ul of anti-phospotyrosine antibody conjugated to horse radish peroxidase (anti-P-Tyr-POD (0.5 ul/ml)) to each well and incubate at 37 degree C. for one hour. Wash the well as above.

[1286] Next add 100 ul of peroxidase substrate solution (Boehringer Mannheim) and incubate at room temperature for at least 5 mins (up to 30 min). Measure the absorbance of the sample at 405 nm by using ELISA reader. The level of bound peroxidase activity is quantitated using an ELISA reader and reflects the level of tyrosine kinase activity.

### Example 39

### High-Throughput Screening Assay Identifying Phosphorylation Activity

[1287] As a potential alternative and/or complement to the assay of protein tyrosine kinase activity described in Example 38, an assay which detects activation (phosphorylation) of major intracellular signal transduction intermediates can also be used. For example, as described below one particular assay can detect tyrosine phosphorylation of the Erk-1 and Erk-2 kinases. However, phosphorylation of other molecules, such as Raf, JNK, p38 MAP, Map kinase kinase (MEK), MEK kinase, Src, Muscle specific kinase (MuSK), IRAK, Tec, and Janus, as well as any other phosphoserine, phosphotyrosine, or phosphothreonine molecule, can be detected by substituting these molecules for Erk-1 or Erk-2 in the following assay.

[1288] Specifically, assay plates are made by coating the wells of a 96-well ELISA plate with 0.1 ml of protein G (1 ug/ml) for 2 hr at room temp, (RT). The plates are then rinsed with PBS and blocked with 3% BSA/PBS for 1 hr at RT. The protein G plates are then treated with 2 commercial monoclonal antibodies (100 ng/well) against Erk-1 and Erk-2 (1 hr at RT) (Santa Cruz Biotechnology). (To detect other molecules, this step can easily be modified by substituting a monoclonal antibody detecting any of the above described molecules.) After 3-5 rinses with PBS, the plates are stored at 4 degree C. until use.

[1289] A431 cells are seeded at 20,000/well in a 96-well Loprodyne filterplate and cultured overnight in growth medium. The cells are then starved for 48 hr in basal medium (DMEM) and then treated with EGF (6 ng/well) or 50 ul of the supernatants obtained in Example 30 for 5-20 minutes. The cells are then solubilized and extracts filtered directly into the assay plate.

[1290] After incubation with the extract for 1 hr at RT, the wells are again rinsed. As a positive control, a commercial preparation of MAP kinase (10 ng/well) is used in place of A431 extract. Plates are then treated with a commercial polyclonal (rabbit) antibody (1 ug/ml) which specifically recognizes the phosphorylated epitope of the Erk-1 and Erk-2 kinases (1 hr at RT). This antibody is biotinylated by standard procedures. The bound polyclonal antibody is then quantitated by successive incubations with Europium-streptavidin and Europium fluorescence enhancing reagent in the Wallac DELFIA instrument (time-resolved fluorescence). An increased fluorescent signal over background indicates a phosphorylation by polypeptide of the present invention or a molecule induced by polypeptide of the present invention.

### Example 40

### Assay for the Stimulation of Bone Marrow CD34+ Cell Proliferation

[1291] This assay is based on the ability of human CD34+ to proliferate in the presence of hematopoietic growth factors and evaluates the ability of isolated polypeptides expressed in mammalian cells to stimulate proliferation of CD34+ cells.

[1292] It has been previously shown that most mature precursors will respond to only a single signal. More immature precursors require at least two signals to respond. Therefore, to test the effect of polypeptides on hematopoietic activity of a wide range of progenitor cells, the assay contains a given polypeptide in the presence or absence of other hematopoietic growth factors. Isolated cells are cultured for 5 days in the presence of Stem Cell Factor (SCF) in combination with tested sample. SCF alone has a very limited effect on the proliferation of bone marrow (BM) cells, acting in such conditions only as a “survival” factor. However, combined with any factor exhibiting stimulatory effect on these cells (e.g., IL-3), SCF will cause a synergistic effect. Therefore, if the tested polypeptide has a stimulatory effect on hematopoietic progenitors, such activity can be easily detected. Since normal BM cells have a low level of cycling cells, it is likely that any inhibitory effect of a given polypeptide, or agonists or antagonists thereof, might not be detected. Accordingly, assays for an inhibitory effect on progenitors is preferably tested in cells that are first subjected to in vitro stimulation with SCF+IL+3, and then contacted with the compound that is being evaluated for inhibition of such induced proliferation.

[1293] Briefly, CD34+ cells are isolated using methods known in the art. The cells are thawed and resuspended in medium (QBSF 60 serum-free medium with 1% L-glutamine (500 ml) Quality Biological, Inc., Gaithersburg, Md. Cat# 160-204-101). After several gentle centrifugation steps at 200×g, cells are allowed to rest for one hour. The cell count is adjusted to 2.5×10⁵ cells/ml. During this time, 100 μl of sterile water is added to the peripheral wells of a 96-well plate. The cytokines that can be tested with a given polypeptide in this assay is rhSCF (R&D Systems, Minneapolis, Minn., Cat# 255-SC) at 50 ng/ml alone and in combination with rhSCF and rhIL-3 (R&D Systems, Minneapolis, Minn., Cat# 203-ML) at 30 ng/ml. After one hour, 10 μl of prepared cytokines, 50 μl of the supernatants prepared in Example 30 (supernatants at 1:2 dilution=50 μl) and 20 μl of diluted cells are added to the media which is already present in the wells to allow for a final total volume of 100 μl. The plates are then placed in a 37° C./5% CO₂ incubator for five days.

[1294] Eighteen hours before the assay is harvested, 0.5 μCi/well of [3H] Thymidine is added in a 10 μl volume to each well to determine the proliferation rate. The experiment is terminated by harvesting the cells from each 96-well plate to a filtermat using the Tomtec Harvester 96. After harvesting, the filtermats are dried, trimmed and placed into OmniFilter assemblies consisting of one OmniFilter plate and one OmniFilter Tray. 60 μl Microscint is added to each well and the plate sealed with TopSeal-A press-on sealing film A bar code 15 sticker is affixed to the first plate for counting. The sealed plates are then loaded and the level of radioactivity determined via the Packard Top Count and the printed data collected for analysis. The level of radioactivity reflects the amount of cell proliferation.

[1295] The studies described in this example test the activity of a given polypeptide to stimulate bone marrow CD34+ cell proliferation. One skilled in the art could easily modify the exemplified studies to test the activity of polynucleotides (e.g., gene therapy), antibodies, agonists, and/or antagonists and fragments and variants thereof. As a nonlimiting example, potential antagonists tested in this assay would be expected to inhibit cell proliferation in the presence of cytokines and/or to increase the inhibition of cell proliferation in the presence of cytokines and a given polypeptide. In contrast, potential agonists tested in this assay would be expected to enhance cell proliferation and/or to decrease the inhibition of cell proliferation in the presence of cytokines and a given polypeptide.

[1296] The ability of a gene to stimulate the proliferation of bone marrow CD34+ cells indicates that polynucleotides and polypeptides corresponding to the gene are useful for the diagnosis and treatment of disorders affecting the immune system and hematopoiesis. Representative uses are described in the “Immune Activity” and “Infectious Disease” sections above, and elsewhere herein.

### Example 41

### Assay for Extracellular Matrix Enhanced Cell Response (EMECR)

[1297] The objective of the Extracellular Matrix Enhanced Cell Response (EMECR) assay is to identity gene products (e.g., isolated polypeptides) that act on the hematopoietic stem cells in the context of the extracellular matrix (ECM) induced signal.

[1298] Cells respond to the regulatory factors in the context of signal(s) received from the surrounding microenvironment. For example, fibroblasts, and endothelial and epithelial stem cells fail to replicate in the absence of signals from the ECM. Hematopoietic stem cells can undergo self-renewal in the bone marrow, but not in in vitro suspension culture. The ability of stem cells to undergo self-renewal in vitro is dependent upon their interaction with the stromal cells and the ECM protein fibronectin (fn). Adhesion of cells to fn is mediated by the α₅.β₁ and α₄.β₁ integrin receptors, which are expressed by human and mouse hematopoietic stem cells. The factor(s) which integrate with the ECM environment and are responsible for stimulating stem cell self-renewal have not yet been identified. Discovery of such factors should be of great interest in gene therapy and bone marrow transplant applications

[1299] Briefly, polystyrene, non tissue culture treated, 96-well plates are coated with fn fragment at a coating concentration of 0.2 μl/cm². Mouse bone marrow cells are plated (1,000 cells/well) in 0.2 ml of serum-free medium. Cells cultured in the presence of IL-3 (5 ng/ml)+SCF (50 ng/ml) would serve as the positive control, conditions under which little self-renewal but pronounced differentiation of the stem cells is to be expected. Gene products of the invention (e.g., including, but not limited to, polynucleotides and polypeptides of the present invention, and supernatants produced in Example 30), are tested with appropriate negative controls in the presence and absence of SCF (5.0 ng/ml), where test factor supernatants represent 10% of the total assay volume. The plated cells are then allowed to grow by incubating in a low oxygen environment (5% CO₂, 7% O₂, and 88% N₂) tissue culture incubator for 7 days. The number of proliferating cells within the wells is then quantitated by measuring thymidine incorporation into cellular DNA. Verification of the positive hits in the assay will require phenotypic characterization of the cells, which can be accomplished by scaling up of the culture system and using appropriate antibody reagents against cell surface antigens and FACScan.

[1300] One skilled in the art could easily modify. the exemplified studies to test the activity of polynucleotides (e.g., gene therapy), antibodies, agonists, and/or antagonists and fragments and variants thereof.

[1301] If a particular polypeptide of the present invention is found to be a stimulator of hematopoietic progenitors, polynucleotides and polypeptides corresponding to the gene encoding said polypeptide may be useful for the diagnosis and treatment of disorders affecting the immune system and hematopoiesis. Representative uses are described in the “Immune Activity” and “Infectious Disease” sections above, and elsewhere herein. The gene product may also be useful in the expansion of stem cells and committed progenitors of various blood lineages, and in the differentiation and/or proliferation of various cell types.

[1302] Additionally, the polynucleotides and/or polypeptides of the gene of interest and/or agonists and/or antagonists thereof, may also be employed to inhibit the proliferation and differentiation of hematopoietic cells and therefore may be employed to protect bone marrow stem cells from chemotherapeutic agents during chemotherapy. This antiproliferative effect may allow administration of higher doses of chemotherapeutic agents and, therefore, more effective chemotherapeutic treatment.

[1303] Moreover, polynucleotides and polypeptides corresponding to the gene of interest may also be useful for the treatment and diagnosis of hematopoietic related disorders such as, for example, anemia, pancytopenia, leukopenia, thrombocytopenia or leukemia since stromal cells are important in the production of cells of hematopoietic lineages. The uses include bone marrow cell ex-vivo culture, bone marrow transplantation, bone marrow reconstitution, radiotherapy or chemotherapy of neoplasia.

### Example 42

### Human Dermal Fibroblast and Aortic Smooth Muscle Cell Proliferation

[1304] The polypeptide of interest is added to cultures of normal human dermal fibroblasts (NHDF) and human aortic smooth muscle cells (AoSMC) and two co-assays are performed with each sample. The first assay examines the effect of the polypeptide of interest on the proliferation of normal human dermal fibroblasts (NHDF) or aortic smooth muscle cells (AoSMC). Aberrant growth of Fibroblasts or smooth muscle cells is a part of several pathological processes, including fibrosis, and restenosis. The second assay examines IL6 production by both NHDF and SMC. IL6 production is an indication of functional activation. Activated cells will have increased production of a number of cytokines and other factors, which can result in a proinflammatory or immunomodulatory outcome. Assays are run with and without co-TNFa stimulation, in order to check for costimulatory or inhibitory activity.

[1305] Briefly, on day 1, 96-well black plates are set up with 1000 cells/well (NHDF) or 2000 cells/well (AoSMC) in 100 li culture media. NHDF culture media contains: Clonetics FB basal media, 1 mg/ml hFGF, 5 mg/ml insulin, 50 mg/ml gentamycin, 2%FBS, while AoSMC culture media contains Clonetics SM basal media, 0.5 μg/ml hEGF, 5 mg/ml insulin, 1 μg/ml hFGF, 50 mg/ml gentamycin, 50 μg/ml Amphotericin B, 5%FBS. After incubation at 37° C. for at least 4-5 hours culture media is aspirated and replaced with growth arrest media. Growth arrest media for NHDF contains fibroblast basal media, 50 mg/ml gentamycin, 2% FBS, while growth arrest media for AoSMC contains SM basal media, 50 mg/ml gentamycin, 50 μg/ml Amphotericin B, 0.4% FBS. Incubate at 37° C. until day 2.

[1306] On day 2, serial dilutions and templates of the polypeptide of interest are designed such that they always include media controls and known-protein controls. For both stimulation and inhibition experiments, proteins are diluted in growth arrest media. For inhibition experiments, TNFa is added to a final concentration of 2 ng/ml (NHDF) or 5 ng/ml (AoSMC). Add ⅓ vol media containing controls or polypeptides of the present invention and incubate at 37 degrees C./5% CO₂ until day 5.

[1307] Transfer 60111 from each well to another labeled 96-well plate, cover with a plate-sealer, and store at 4 degrees C. until Day 6 (for IL6 ELISA). To the remaining 100 μl in the cell culture plate, aseptically add Alamar Blue in an amount equal to 10% of the culture volume (10 μl). Return plates to incubator for 3 to 4 hours. Then measure fluorescence with excitation at 530 nm and emission at 590 nm using the CytoFluor. This yields the growth stimulation/inhibition data.

[1308] On day 5, the IL6 ELISA is performed by coating a 96 well plate with 50-100 ul/well of Anti-Human IL6 Monoclonal antibody diluted in PBS, pH 7.4, incubate ON at room temperature.

[1309] On day 6, empty the plates into the sink and blot on paper towels. Prepare Assay Buffer containing PBS with 4% BSA. Block the plates with 200 μl/well of Pierce Super Block blocking buffer in PBS for 1-2 hr and then wash plates with wash buffer (PBS, 0.05% Tween-20). Blot plates on paper towels. Then add 50 μl/well of diluted Anti-Human IL-6 Monoclonal, Biotin-labeled antibody at 0.50 mg/ml. Make dilutions of IL-6 stock in media (30, 10, 3, 1, 0.3, 0 ng/ml). Add duplicate samples to top row of plate. Cover the plates and incubate for 2 hours at RT on shaker.

[1310] Plates are washed with wash buffer and blotted on paper towels. Dilute EU-labeled Streptavidin 1:1000 in Assay buffer, and add 100 μl/well. Cover the plate and incubate 1 h at RT. Plates are again washed with wash buffer and blotted on paper towels.

[1311] Add 100 μl well of Enhancement Solution. Shake for 5 minutes. Read the plate on the Wallac DELFIA Fluorometer. Readings from triplicate samples in each assay were tabulated and averaged.

[1312] A positive result in this assay suggests AoSMC cell proliferation and that the polypeptide of the present invention may be involved in dermal fibroblast proliferation and/or smooth muscle cell proliferation. A positive result also suggests many potential uses of polypeptides, polynucleotides, agonists and/or antagonists of the polynucleotide/polypeptide of the present invention which gives a positive result. For example, inflammation and immune responses, wound healing, and angiogenesis, as detailed throughout this specification. Particularly, polypeptides of the present invention and polynucleotides of the present invention may be used in wound healing and dermal regeneration, as well as the promotion of vasculogenesis, both of the blood vessels and lymphatics. The growth of vessels can be used in the treatment of, for example, cardiovascular diseases. Additionally, antagonists of polypeptides and polynucleotides of the invention may be useful in treating diseases, disorders, and/or conditions which involve angiogenesis by acting as an anti-vascular agent (e.g., anti-angiogenesis). These diseases, disorders, and/or conditions are known in the art and/or are described herein, such as, for example, malignancies, solid tumors, benign tumors, for example hemangiomas, acoustic neuromas, neurofibromas, trachomas, and pyogenic granulomas; artheroscleric plaques; ocular angiogenic diseases, for example, diabetic retinopathy, retinopathy of prematurity, macular degeneration, corneal graft rejection, neovascular glaucoma, retrolental fibroplasia, rubeosis, retinoblastoma, uvietis and Pterygia (abnormal blood vessel growth) of the eye; rheumatoid arthritis; psoriasis; delayed wound healing; endometriosis; vasculogenesis; granulations; hypertrophic scars (keloids); nonunion fractures; scleroderma; trachoma; vascular adhesions; myocardial angiogenesis; coronary collaterals; cerebral collaterals; arteriovenous malformations; ischemic limb angiogenesis; Osler-Webber Syndrome; plaque neovascularization; telangiectasia; hemophiliac joints; angiofibroma; fibromuscular dysplasia; wound granulation; Crohn's disease; and atherosclerosis. Moreover, antagonists of polypeptides and polynucleotides of the invention may be useful in treating anti-hyperproliferative diseases and/or anti-inflammatory known in the art and/or described herein.

[1313] One skilled in the art could easily modify the exemplified studies to test the activity of polynucleotides (e.g., gene therapy), antibodies, agonists, and/or antagonists and fragments and variants thereof.

### Example 43

### Cellular Adhesion Molecule (CAM) Expression on Endothelial Cells

[1314] The recruitment of lymphocytes to areas of inflammation and angiogenesis involves specific receptor-ligand interactions between cell surface adhesion molecules (CAMs) on lymphocytes and the vascular endothelium. The adhesion process, in both normal and pathological settings, follows a multi-step cascade that involves intercellular adhesion molecule-1 (ICAM-1), vascular cell adhesion molecule-1 (VCAM-1), and endothelial leukocyte adhesion molecule-1 (E-selectin) expression on endothelial cells (EC). The expression of these molecules and others on the vascular endothelium determines the efficiency with which leukocytes may adhere to the local vasculature and extravasate into the local tissue during the development of an inflammatory response. The local concentration of cytokines and growth factor participate in the modulation of the expression of these CAMs.

[1315] Briefly, endothelial cells (e.g., Human Umbilical Vein Endothelial cells (HUVECs)) are grown in a standard 96 well plate to confluence, growth medium is removed from the cells and replaced with 100 μl of 199 Medium (10% fetal bovine serum (FBS)). Samples for testing and positive or negative controls are added to the plate in triplicate (in 10 μl volumes). Plates are then incubated at 37° C. for either 5 h (selectin and integrin expression) or 24 h (integrin expression only). Plates are aspirated to remove medium and 100 μl of 0.1% paraformaldehyde-PBS (with Ca++ and Mg++) is added to each well. Plates are held at 4° C. for 30 min. Fixative is removed from the wells and wells are washed 1× with PBS(+Ca,Mg)+0.5% BSA and drained. 10 μl of diluted primary antibody is added to the test and control wells. Anti-ICAM-1-Biotin, Anti-VCAM-1-Biotin and Anti-E-selectin-Biotin are used at a concentration of 10 μg/ml (1:10 dilution of 0.1 mg/ml stock antibody). Cells are incubated at 37° C. for 30 min. in a humidified environment. Wells are washed three times with PBS(+Ca,Mg)+0.5% BSA. 20 μl of diluted ExtrAvidin-Alkaline Phosphatase (1:5,000 dilution, referred to herein as the working dilution) are added to each well and incubated at 37° C. for 30 min. Wells are washed three times with PBS(+Ca,Mg)+0.5% BSA. Dissolve 1 tablet of p-Nitrophenol Phosphate pNPP per 5 ml of glycine buffer (pH 10.4). 100 μl of pNPP substrate in glycine buffer is added to each test well. Standard wells in triplicate are prepared from the working dilution of the ExtrAvidin-Alkaline Phosphotase in glycine buffer: 1:5,000 (10⁰)>10^{-0.5}>10⁻¹>10^{-1.5}. 5 μl of each dilution is added to triplicate wells and the resulting AP content in each well is 5.50 ng, 1.74 ng, 0.55 ng, 0.18 ng. 100 μl of pNNP reagent is then added to each of the standard wells. The plate is incubated at 37° C. for 4 h. A volume of 50 μl of 3M NaOH is added to all wells. The plate is read on a plate reader at 405 nm using the background subtraction option on blank wells filled with glycine buffer only. Additionally, the template is set up to indicate the concentration of AP-conjugate in each standard well [5.50 ng; 1.74 ng; 0.55 ng; 0.18 ng]. Results are indicated as amount of bound AP-conjugate in each sample.

### Example 44

### Alamar Blue Endothelial Cells Proliferation Assay

[1316] This assay may be used to quantitatively determine protein mediated inhibition of bFGF-induced proliferation of Bovine Lymphatic Endothelial Cells (LECs), Bovine Aortic Endothelial Cells (BAECs) or Human Microvascular Uterine Myometrial Cells (UTMECs). This assay incorporates a fluorometric growth indicator based on detection of metabolic activity. A standard Alamar Blue Proliferation Assay is prepared in EGM-2MV with 10 ng/ml of bFGF added as a source of endothelial cell stimulation. This assay may be used with a variety of endothelial cells with slight changes in growth medium and cell concentration. Dilutions of the protein batches to be tested are diluted as appropriate. Serum-free medium (GIBCO SFM) without BFGF is used as a non-stimulated control and Angiostatin or TSP-1 are included as a known inhibitory controls.

[1317] Briefly, LEC, BAECs or UTMECs are seeded in growth media at a density of 5000 to 2000 cells/well in a 96 well plate and placed at 37 degrees C. overnight. After the overnight incubation of the cells, the growth media is removed and replaced with GIBCO EC-SFM. The cells are treated with the appropriate dilutions of the protein of interest or control protein sample(s) (prepared in SFM) in triplicate wells with additional bFGF to a concentration of 10 ng/ml. Once the cells have been treated with the samples, the plate(s) is/are placed back in the 37° C. incubator for three days. After three days 10 ml of stock alamar blue (Biosource Cat# DAL 1100) is added to each well and the plate(s) is/are placed back in the 37° C. incubator for four hours. The plate(s) are then read at 530 nm excitation and 590 nm emission using the CytoFluor fluorescence reader. Direct output is recorded in relative fluorescence units.

[1318] Alamar blue is an oxidation-reduction indicator that both fluoresces and changes color in response to chemical reduction of growth medium resulting from cell growth. As cells grow in culture, innate metabolic activity results in a chemical reduction of the immediate surrounding environment. Reduction related to growth causes the indicator to change from oxidized (non-fluorescent blue) form to reduced (fluorescent red) form (i.e., stimulated proliferation will produce a stronger signal and inhibited proliferation will produce a weaker signal and the total signal is proportional to the total number of cells as well as their metabolic activity). The background level of activity is observed with the starvation medium alone. This is compared to the output observed from the positive control samples (bFGF in growth medium) and protein dilutions.

### Example 45

### Detection of Inhibition of a Affixed Lymphocyte Reaction

[1319] This assay can be used to detect and evaluate inhibition of a Mixed Lymphocyte Reaction (MLR) by gene products (e.g., isolated polypeptides). Inhibition of a MLR may be due to a direct effect on cell proliferation and viability, modulation of costimulatory molecules on interacting cells, modulation of adhesiveness between lymphocytes and accessory cells, or modulation of cytokine production by accessory cells. Multiple cells may be targeted by these polypeptides since the peripheral blood mononuclear fraction used in this assay includes T, B and natural killer lymphocytes, as well as monocytes and dendritic cells.

[1320] Polypeptides of interest found to inhibit the MLR may find application in diseases associated with lymphocyte and monocyte activation or proliferation. These include, but are not limited to, diseases such as asthma, arthritis, diabetes, inflammatory skin conditions, psoriasis, eczema, systemic lupus erythematosus, multiple sclerosis, glomerulonephritis, inflammatory bowel disease, crohn's disease, ulcerative colitis, arteriosclerosis, cirrhosis, graft vs. host disease, host vs. graft disease, hepatitis, leukemia and lymphoma.

[1321] Briefly, PBMCs from human donors are purified by density gradient centrifugation using Lymphocyte Separation Medium (LSM®, density 1.0770 g/ml, Organon Teknika Corporation, West Chester, Pa.). PBMCs from two donors are adjusted to 2×10⁶ cells/ml in RPMI-1640 (Life Technologies, Grand Island, N.Y.) supplemented with 10% FCS and 2 mM glutamine. PBMCs from a third donor is adjusted to 2×10⁵ cells/ml. Fifty microliters of PBMCs from each donor is added to wells of a 96-well round bottom microtiter plate. Dilutions of test materials (50 μl) is added in triplicate to microtiter wells. Test samples (of the protein of interest) are added for final dilution of 1:4; rhuIL-2 (R&D Systems, Ninneapolis, Minn., catalog number 202-IL) is added to a final concentration of 1 82 g/ml; anti-CD4 mAb (R&D Systems, clone 34930.11, catalog number MAB379) is added to a final concentration of 10 μg/ml. Cells are cultured for 7-8 days at 37° C. in 5% CO₂, and 1 μC of [³H] thymidine is added to wells for the last 16 hrs of culture. Cells are harvested and thymidine incorporation determined using a Packard TopCount. Data is expressed as the mean and standard deviation of triplicate determinations.

[1322] Samples of the protein of interest are screened in separate experiments and compared to the negative control treatment, anti-CD4 mAb, which inhibits proliferation of lymphocytes and the positive control treatment, IL-2 (either as recombinant material or supernatant), which enhances proliferation of lymphocytes.

[1323] One skilled in the art could easily modify the exemplified studies to test the activity of polynucleotides (e.g., gene therapy), antibodies, agonists, and/or antagonists and fragments and variants thereof.

### Example 46

### Assays for Protease Activity

[1324] The following assay may be used to assess protease activity of the polypeptides of the invention.

[1325] Gelatin and casein zymography are performed essentially as described (Heusen et al., Anal. Biochem., 102:196-202 (1980); Wilson et al., Journal of Urology, 149:653-658 (1993)). Samples are run on 10% polyacryamide/0.1% SDS gels containing 1% gelain orcasein, soaked in 2.5% triton at room temperature for 1 hour, and in 0.1M glycine, pH 8.3 at 37° C. 5 to 16 hours. After staining in amido black areas of proteolysis apear as clear areas agains the blue-black background. Trypsin (Sigma T8642) is used as a positive control.

[1326] Protease activity is also determined by monitoring the cleavage of n-a-benzoyl-L-arginine ethyl ester (BAEE) (Sigma B-4500. Reactions are set up in (25 mNfNaPO₄, 1 mM EDTA, and 1 mM BAEE), pH 7.5. Samples are added and the change in adsorbance at 260 nm is monitored on the Beckman DU-6 spectrophotometer in the time-drive mode. Trypsin is used as a positive control.

[1327] Additional assays based upon the release of acid-soluble peptides from casein or hemoglobin measured as adsorbance at 280 nm or colorimetrically using the Folin method are performed as described in Bergmeyer, et al., Methods of Enzymatic Analysis, 5 (1984). Other assays involve the solubilization of chromogenic substrates (Ward, Applied Science, 251-317 (1983).

### Example 47

### Identifying Serine Protease Substrate Specificity

[1328] Methods known in the art or described herein may be used to determine the substrate specificity of the polypeptides of the present invention having serine protease activity. A preferred method of determining substrate specificity is by the use of positional scanning synthetic combinatorial libraries as described in GB 2 324 529 (incorporated herein in its entirety).

### Example 48

### Ligand Binding Assays

[1329] The following assay may be used to assess ligand binding activity of the polypeptides of the invention.

[1330] Ligand binding assays provide a direct method for ascertaining receptor pharmacology and are adaptable to a high throughput format. The purified ligand for a polypeptide is radiolabeled to high specific activity (50-2000 Ci/mmol) for binding studies. A determination is then made that the process of radiolabeling does not diminish the activity of the ligand towards its polypeptide. Assay conditions for buffers, ions, pH and other modulators such as nucleotides are optimized to establish a workable signal to noise ratio for both membrane and whole cell polypeptide sources. For these assays, specific polypeptide binding is defined as total associated radioactivity minus the radioactivity measured in the presence of an excess of unlabeled competing ligand. Where possible, more than one competing ligand is used to define residual nonspecific binding.

### Example 49

### Functional Assay in Xenopus Oocytes

[1331] Capped RNA transcripts from linearized plasmid templates encoding the polypeptides of the invention are synthesized in vitro with RNA polymerases in accordance with standard procedures. In vitro transcripts are suspended in water at a final concentration of 0.2 mg/ml. Ovarian lobes are removed from adult female toads, Stage V defolliculated oocytes are obtained, and RNA transcripts (10 ng/oocytc) are injected in a 50 nl bolus using a microinjection apparatus. Two electrode voltage clamps are used to measure the currents from individual Xenopus oocytes. in response polypeptides and polypeptide agonist exposure. Recordings are made in Ca2+ free Barth's medium at room temperature. The Xenopus system can be used to screen known ligands and tissue/cell extracts for activating ligands.

### Example 50

### Microphysiometric Assays

[1332] Activation of a wide variety of secondary messenger systems results in extrusion of small amounts of acid from a cell. The acid formed is largely as a result of the increased metabolic activity required to fuel the intracellular signaling process. The pH changes in the media surrounding the cell are very small but are detectable by the CYTOSENSOR microphysiometer (Molecular Devices Ltd., Menlo Park, Calif.). The CYTOSENSOR is thus capable of detecting the activation of polypeptide which is coupled to an energy utilizing intracellular signaling pathway.

### Example 51

### Extract/Cell Supernatant Screening

[1333] A large number of mammalian receptors exist for which there remains, as yet, no cognate activating ligand (agonist). Thus, active ligands for these receptors may not be included within the ligands banks as identified to date. Accordingly, the polypeptides of the invention can also be functionally screened (using calcium, cAMP, microphysiometer, oocyte electrophysiology, etc., functional screens) against tissue extracts to identify its natural ligands. Extracts that produce positive functional responses can be sequentially subfractionated until an activating ligand is isolated and identified.

### Example 52

### Calcium and cAMP Functional Assays

[1334] Seven transmembrane receptors which are expressed in HEK 293 cells have been shown to be coupled functionally to activation of PLC and calcium mobilization and/or cAMP stimulation or inhibition. Basal calcium levels in the HEK 293 cells in receptor-transfected or vector control cells were observed to be in the normal, 100 nM to 200 nM, range. HEK 293 cells expressing recombinant receptors are loaded with fura 2 and in a single day>150 selected ligands or tissue/cell extracts are evaluated for agonist induced calcium mobilization. Similarly, HEK 293 cells expressing recombinant receptors are evaluated for the stimulation or inhibition of cAMP production using standard cAMP quantitation assays. Agonists presenting a calcium transient or cAMP fluctuation are tested in vector control cells to determine if the response is unique to the transfected cells expressing receptor.

### Example 53

### A TP-Binding Assay

[1335] The following assay may be used to assess ATP-binding activity of polypeptides of the invention.

[1336] ATP-binding activity of the polypeptides of the invention may be detected using the ATP-binding assay described in U.S. Pat. No. 5,858,719, which is herein incorporated by reference in its entirety. Briefly, ATP-binding to polypeptides of the invention is measured via photoaffinity labeling with 8-azido-ATP in a competition assay. Reaction mixtures containing 1 mg/ml of the ABC transport protein of the present invention are incubated with varying concentrations of ATP, or the non-hydrolyzable ATP analog adenyl-5′-imidodiphosphate for 10 minutes at 4° C. A mixture of 8-azido-ATP (Sigma Chem. Corp., St. Louis, Mo.) plus 8-azido-ATP (³²P ATP) (5 mCi/μmol, ICN, Irvine Calif.) is added to a final concentration of 100 μM and 0.5 ml aliquots are placed in the wells of a porcelain spot plate on ice. The plate is irradiated using a short wave 254 nm UV lamp at a distance of 2.5 cm from the plate for two one-minute intervals with a one-minute cooling interval in between. The reaction is stopped by addition of dithiothreitol to a final concentration of 2 mM. The incubations are subjected to SDS-PAGE electrophoresis, dried, and autoradiographed. Protein bands corresponding to the particular polypeptides of the invention are excised, and the radioactivity quantified. A decrease in radioactivity with increasing ATP or adenly-5′-imidodiphosphate provides a measure of ATP affinity to the polypeptides.

### Example 54

### Small Molecule Screening

[1337] This invention is particularly useful for screening therapeutic compounds by using the polypeptides of the invention, or binding fragments thereof, in any of a variety of drug screening techniques. The polypeptide or fragment employed in such a test may be affixed to a solid support, expressed on a cell surface, free in solution, or located intracellularly. One method of drug screening utilizes eukaryotic or prokaryotic host cells which are stably transformed with recombinant nucleic acids expressing the polypeptide or fragment. Drugs are screened against such transformed cells in competitive binding assays. One may measure, for example, the formulation of complexes between the agent being tested and polypeptide of the invention.

[1338] Thus, the present invention provides methods of screening for drugs or any other agents which affect activities mediated by the polypeptides of the invention. These methods comprise contacting such an agent with a polypeptide of the invention or fragment thereof and assaying for the presence of a complex between the agent and the polypeptide or fragment thereof, by methods well known in the art. In such a competitive binding assay, the agents to screen are typically labeled. Following incubation, free agent is separated from that present in bound form, and the amount of free or uncomplexed label is a measure of the ability of a particular agent to bind to the polypeptides of the invention.

[1339] Another technique for drug screening provides high throughput screening for compounds having suitable binding affinity to the polypeptides of the invention, and is described in great detail in European Patent Application 84/03564, published on Sep. 13, 1984, which is herein incorporated by reference in its entirety. Briefly stated, large numbers of different small molecule test compounds are synthesized on a solid substrate, such as plastic pins or some other surface. The test compounds are reacted with polypeptides of the invention and washed. Bound polypeptides are then detected by methods well known in the art. Purified polypeptides are coated directly onto plates for use in the aforementioned drug screening techniques. In addition, non-neutralizing antibodies may be used to capture the peptide and immobilize it on the solid support.

[1340] This invention also contemplates the use of competitive drug screening assays in which neutralizing antibodies capable of binding polypeptides of the invention specifically compete with a test compound for binding to the polypeptides or fragments thereof. In this manner, the antibodies are used to detect the presence of any peptide which shares one or more antigenic epitopes with a polypeptide of the Invention.

### Example 55

### Phosphorylation Assay

[1341] In order to assay for phosphorylation activity of the polypeptides of the invention, a phosphorylation assay as described in U.S. Pat. No. 5,958,405 (which is herein incorporated by reference) is utilized. Briefly, phosphorylation activity may be measured by phosphorylation of a protein substrate using gamma-labeled ³²P-ATP and quantitation of the incorporated radioactivity using a gamma radioisotope counter. The polypeptides of the invention are incubated with the protein substrate, ³²P-ATP, and a kinase buffer. The ³²P incorporated into the substrate is then separated from free ³²P ATP by electrophoresis, and the incorporated ³²P is counted and compared to a negative control. Radioactivity counts above the negative control are indicative of phosphorylation activity of the polypeptides of the invention.

### Example 56

### Detection of Phosphorylation Activity (Activation) of the Polypeptides of the Invention in the Presence of Polypeptide Ligands

[1342] Methods known in the art or described herein may be used to determine the phosphorylation activity of the polypeptides of the invention. A preferred method of determining phosphorylation activity is by the use of the tyrosine phosphorylation assay as described in U.S. Pat. No. 5,817,471 (incorporated herein by reference).

### Example 57

### Identification of Signal Transduction Proteins that Interact With Polypeptides of the Present Invention

[1343] The purified polypeptides of the invention are research tools for the identification, characterization and purification of additional signal transduction pathway proteins or receptor proteins. Briefly, labeled receptor PTK polypeptide is useful as a reagent for the purification of molecules with which it interacts. In one embodiment of affinity purification, receptor PTK polypeptide is covalently coupled to a chromatography column. Cell-free extract derived from putative target cells, such as carcinoma tissues, is passed over the column, and molecules with appropriate affinity bind to the receptor PTK polypeptides, or specific phosphotyrosine-recognition domains thereof. The receptor PTK polypeptide interacting protein-complex is recovered from the colurnn, dissociated, and the recovered molecule subjected to N-terminal protein sequencing. This amino acid sequence is then used to identify the captured molecule or to design degenerate oligonucleotide probes for cloning the relevant gene from an appropriate cDNA library.

### Example 58

### IL-6 Bioassay

[1344] To test the proliferative effects of the polypeptides of the invention, the IL-6 Bioassay as described by Marz et al. is utilized (Proc. Natl. Acad. Sci., U.S.A., 95:3251-56 (1998), which is herein incorporated by reference). Briefly, IL-6 dependent B9 murine cells are washed three times in IL-6 free medium and plated at a concentration of 5,000 cells per well in 50 μl, and 50 μl of the IL-6-like polypeptide is added. After 68 hrs. at 37° C., the number of viable cells is measured by adding the tetrazolium salt thiazolyl blue (MTT) and incubating for a further 4 hrs. at 37° C. B9 cells are lysed by SDS and optical density is measured at 570 nm. Controls containing IL-6 (positive) and no cytokine (negative) are utilized. Enhanced proliferation in the test sample(s) relative to the negative control is indicative of proliferative effects mediated by polypeptides of the invention.

### Example 59

### Support of Chicken Embryo Neuron Survival

[1345] To test whether sympathetic neuronal cell viability is supported by polypeptides of the invention, the chicken embryo neuronal survival assay of Senaldi et al is utilized (Proc. Natl. Acad. Sci., U.S.A., 96:11458-63 (1998), which is herein incorporated by reference). Briefly, motor and sympathetic neurons are isolated from chicken embryos, resuspended in L15 medium (with 10% FCS, glucose, sodium selenite, progesterone, conalbumin, putrescine, and insulin; Life Technologies, Rockville, Md.) and Dulbecco's modified Eagles medium [with 10% FCS, glutamine, penicillin, and 25 mM Hepes buffer (pH 7.2); Life Technologies, Rockville, Md.], respectively, and incubated at 37° C. in 5% CO₂ in the presence of different concentrations of the purified IL-6-like polypeptide, as well as a negative control lacking any cytokine. After 3 days, neuron survival is determined by evaluation of cellular morphology, and through the use of the calorimetric assay of Mosmann (Mossman, T., J. Immunol. Methods, 65:55-63 (1983)). Enhanced neuronal cell viability as compared to the controls lacking cytokine is indicative of the ability of the inventive purified IL-6-like polypeptide(s) to enhance the survival of neuronal cells.

### Example 60

### Assay for Phosphatase Activity

[1346] The following assay may be used to assess serine/threonine phosphatase (PTPase) activity of the polypeptides of the invention.

[1347] In order to assay for serine/threonine phosphatase (PTPase) activity, assays can be utilized which are widely known to those skilled in the art. For example, the serine/threonine phosphatase (PSPase) activity is measured using a PSPase assay kit from New England Biolabs, Inc. Myelin basic protein (MyBP), a substrate for PSPase, is phosphorylated on serine and threonine residues with cAMP-dependent Protein Kinase in the presence of [³²P]ATP. Protein serine/threonine phosphatase activity is then determined by measuring the release of inorganic phosphate from ³²P-labeled MyBP.

### Example 61

### Interaction of Serine/Threonine Phosphatases with Other Proteins

[1348] The polypeptides of the invention with serine/threonine phosphatase activity as determined in Example 60 are research tools for the identification, characterization and purification of additional interacting proteins or receptor proteins, or other signal transduction pathway proteins. Briefly, labeled polypeptide(s) of the invention is useful as a reagent for the purification of molecules with which it interacts. In one embodiment of affinity purification, polypeptide of the invention is covalently coupled to a chromatography column. Cell-free extract derived from putative target cells, such as neural or liver cells, is passed over the column, and molecules with appropriate affinity bind to the polypeptides of the invention. The polypeptides of the invention complex is recovered from the column, dissociated, and the recovered molecule subjected to N-terminal protein sequencing. This amino acid sequence is then used to identify the captured molecule or to design degenerate oligonucleotide probes for cloning the relevant gene from an appropriate cDNA library.

### Example 62

### Assaying for Heparanase Activity

[1349] In order to assay for heparanase activity of the polypeptides of the invention, the heparanase assay described by Vlodavsky et al is utilized (Vlodavsky, I., et al., Nat. Med., 5:793-802 (1999)). Briefly, cell lysates, conditioned media or intact cells (1×10⁶ cells per 35-mm dish) are incubated for 18 hrs at 37° C., pH 6.2-6.6, with ³⁵S-labeled ECM or soluble ECM derived peak I proteoglycans. The incubation medium is centrifuged and the supernatant is analyzed by gel filtration on a Sepharose CL-6B column (0.9×30 cm). Fractions are eluted with PBS and their radioactivity is measured. Degradation fragments of heparan sulfate side chains are eluted from Sepharose 6B at 0.5<Kₐᵥ<0.8 (peak II). Each experiment is done at least three times. Degradation fragments corresponding to “peak II,” as described by Vlodavsky et al., is indicative of the activity of the polypeptides of the invention in cleaving heparan sulfate.

### Example 63

### Immobilization of biomolecules

[1350] This example provides a method for the stabilization of polypeptides of the invention in non-host cell lipid bilayer constucts (see, e.g., Bieri et al., Nature Biotech 17:1105-1108 (1999), hereby incorporated by reference in its entirety herein) which can be adapted for the study of polypeptides of the invention in the various functional assays described above. Briefly, carbohydrate-specific chemistry for biotinylation is used to confine a biotin tag to the extracetlular domain of the polypeptides of the invention, thus allowing uniform orientation upon immobilization. A 50 uM solution of polypeptides of the invention in washed membranes is incubated with 20 mM NaIO4 and 1.5 mg/ml (4 mM) BACH or 2 mg/ml (7.5 mM) biotin-hydrazide for 1 hr at room temperature (reaction volume, 150 ul). Then the sample is dialyzed (Pierce Slidealizer Cassett, 10 kDa cutoff; Pierce Chemical Co., Rockford Ill.) at 4C first for 5 h, exchanging the buffer after each hour, and finally for 12 h against 500 ml buffer R (0.15 NaCl, 1 mM MgCl2, 10 mM sodium phosphate, pH 7). Just before addition into a cuvette, the sample is diluted-1:5 in buffer ROG50 (Buffer R supplemented with 50 mM octylglucoside).

### Example 64

### TAQMAN

[1351] Quantitative PCR (QPCR). Total RNA from cells in culture are extracted by Trizol separation as recommended by the supplier (LifeTechnologies). (Total RNA is treated with DNase I (Life Technologies) to remove any contaminating genomic DNA before reverse transcription.) Total RNA (50 ng) is used in a one-step, 50 ul, RT-QPCR, consisting of Taqman Buffer A (Perkin-Elmer; 50 mM KCl/10 mM Tris, pH 8.3), 5.5 mM MgCl₂, 240 μM each dNTP, 0.4 units RNase inhibitor (Promega), 8%glycerol, 0.012% Tween-20, 0.05% gelatin, 0.3 uM primers, 0.1 uM probe, 0.025 units Amplitaq Gold (Perkin-Elmer) and 2.5 units Superscript II reverse transcriptase (Life Technologies). As a control for genomic contamination, parallel reactions are setup without reverse transcriptase. The relative abundance of (unknown) and 18S RNAs are assessed by using the Applied Biosystems Prism 7700 Sequence Detection System (Livak, K. J., Flood, S. J., Marmaro, J., Giusti, W. & Deetz, K. (1995) PCR Methods Appl. 4, 357-362). Reactions are carried out at 48° C. for 30 min, 95° C. for 10 min, followed by 40 cycles of 95° C. for 15 s, 60° C. for 1 min. Reactions are performed in triplicate.

[1352] Primers (f & r) and FRET probes sets are designed using Primer Express Software (Perkin-Elmer). Probes are labeled at the 5′-end with the reporter dye 6- and FAM and on the 3′-end with the quencher dye TAMRA (Biosource International, Camarillo, Calif. or Perkin-Elmer).

### Example 65

### Assays for Metalloproteinase Activity

[1353] Metalloproteinases (EC 3.4.24.-) are peptide hydrolases which use metal ions, such as Zn²⁺, as the catalytic mechanism. Metalloproteinase activity of polypeptides of the present invention can be assayed according to the following methods.

[1354] Proteolysis of alpha-2-macroglobulin

[1355] To confirm protease activity, purified polypeptides of the invention are mixed with the substrate alpha-2-macroglobulin (0.2 unit/ml; Boehringer Mannheim, Germany) in 1×assay buffer (50 mM HEPES, pH 7.5, 0.2 M NaCl, 10 mM CaCl₂, 25 μM ZnCl₂ and 0.05% Brij-35) and incubated at 37° C. for 1-5 days. Trypsin is used as positive control. Negative controls contain only alpha-2-macroglobulin in assay buffer. The samples are collected and boiled in SDS-PAGE sample buffer containing 5% 2-mercaptoethanol for 5-min, then loaded onto 8% SDS-polyacrylamide gel. After electrophoresis the proteins are visualized by silver staining. Proteolysis is evident by the appearance of lower molecular weight bands as compared to the negative control.

[1356] Inhibition of alpha-2-macroglobulin Proteolysis by Inhibitors of Metalloproteinases

[1357] Known metalloproteinase inhibitors (metal chelators (EDTA, EGTA, AND HgCl₂), peptide metalloproteinase inhibitors (TIMP-1 and TIMP-2), and commercial small molecule MMP inhibitors) are used to characterize the proteolytic activity of polypeptides of the invention. The three synthetic MMP inhibitors used are: MMP inhibitor I, [IC₅₀=1.0 μM against MMP-1 and MMP-8; IC₅₀=30 μM against MMP-9; IC₅₀=150 μM against MMP-3]; MMP-3 (stromelysin-1) inhibitor I [IC₅₀=5 μM against MMP-3], and MMP-3 inhibitor II [Kᵢ=130 nM against MMP-3]; inhibitors available through Calbiochem, catalog # 444250, 444218, and 444225, respectively). Briefly, different concentrations of the small molecule MMP inhibitors are mixed with purified polypeptides of the invention (50 μg/ml) in 22.9 μl of 1×HEPES buffer (50 mM HEPES, pH 7.5, 0.2 M NaCl, 10 mM CaCl₂, 25 μM ZnCl₂ and 0.05%Brij-35) and incubated at room temperature (24° C.) for 2-hr, then 7.1 μl of substrate alpha-2-macroglobulin (0.2 unit/ml) is added and incubated at 37° C. for 20-hr. The reactions are stopped by adding 4×sample buffer and boiled immediately for 5 minutes. After SDS-PAGE, the protein bands are visualized by silver stain.

[1358] Synthetic Fluorogenic Peptide Substrates Cleavage Assay

[1359] The substrate specificity for polypeptides of the invention with demonstrated metalloproteinase activity can be determined using synthetic fluorogenic peptide substrates (purchased from BACHEEM Bioscience Inc). Test substrates include, M-1985, M-2225, M-2105, M-2110, and M-2255. The first four are MMP substrates and the last one is a substrate of tumor necrosis factor-α (TNF-α) converting enzyme (TACE). All the substrates are prepared in 1:1 dimethyl sulfoxide (DMSO) and water. The stock solutions are 50-500 μM. Fluorescent assays are performed by using a Perkin Elmer LS 50B luminescence spectrometer equipped with a constant temperature water bath. The excitation k is 328 nm and the emission λ is 393 run. Briefly, the assay is carried out by incubating 176 μl 1×HEPES buffer (0.2 M NaCl, 10 mM CaCl₂, 0.05% Brij-35 and 50 mM HEPES, pH 7.5) with 4 μl of substrate solution (50 μM) at 25° C. for 15 minutes, and then adding 20 μl of a purified polypeptide of the invention into the assay cuvett. The final concentration of substrate is 1 μM. Initial hydrolysis rates are monitored for 30-min.

### Example 66

### Characterization of the cDNA Contained in a Deposited Plasmid

[1360] The size of the cDNA insert contained in a deposited plasmid may be routinely determined using techniques known in the art, such as PCR amplification using synthetic primers hybridizable to the 3′ and 5′ ends of the cDNA sequence. For example, two primers of 17-30 nucleotides derived from each end of the cDNA (i.e., hybridizable to the absolute 5′ nucleotide or the 3′ nucleotide end of the sequence of SEQ ID NO:X, respectively) are synthesized and used to amplify the cDNA using the deposited cDNA plasmid as a template. The polymerase chain reaction is carried out under routine conditions, for instance, in 25 ul of reaction mixture with 0.5 ug of the above cDNA template. A convenient reaction mixture is 1.5-5 mM MgCl₂, 0.01% (w/v) gelatin, 20 uM each of dATP, dCTP, dGTP, dTTP, 25 pmol of each primer and 0.25 Unit of Taq polymerase. Thirty five cycles of PCR (denaturation at 94 degree C. for 1 min; annealing at 55 degree C. for 1 min; elongation at 72 degree C. for 1 min) are performed with a Perkin-Elmer Cetus automated thermal cycler. The amplified product is analyzed by agarose gel electrophoresis. The PCR product is verified to be the selected sequence by subcloning and sequencing the DNA product.

[1361] Use of the above methodologies and/or other methodologies known in the art generates fragments from the clone corresponding to the approximate fragments described in Table 8, below. Accordingly, Table 8 provides a physical characterization of certain clones encompassed by the invention. The first column provides the unique clone identifier, “Clone ID NO:Z”, for cDNA clones of the invention, as described in Table 1A. The second column provides the approximate size of the cDNA insert contained in the corresponding cDNA clone.

TABLE 8

| | cDNA |
|---|---|
| Clone ID | Insert |
| NO: Z | Size: |
| HTNBO21 | 900 |

[1362] It will be clear that the invention may be practiced otherwise than as particularly described in the foregoing description and examples. Numerous modifications and variations of the present invention are possible in light of the above teachings and, therefore, are within the scope of the appended claims.

[1363] The entire disclosure of each document cited (including patents, patent applications, journal articles, abstracts, laboratory manuals, books, or other disclosures) in the Background of the Invention, Detailed Description, and Examples is hereby incorporated herein by reference. In addition, the CD-R copy of the sequence listing submitted herewith and the corresponding computer readable form are both incorporated herein by reference in their entireties. The specification and Sequence Listing of each of the following U.S. applications are herein incorporated by reference in their entirety: Application No. 60/179,065, filed on Jan. 31, 2000; Application No. 60/180,628, filed on Feb. 4, 2000; Application No. 60/214,886, filed on Jun. 28, 2000; Application No. 60/217,487, filed on Jul. 11, 2000; Application No. 60/225,758, filed on Aug. 14, 2000; Application No. 60/220,963, filed on Jul. 26, 2000; Application No. 60/217,496, filed on Jul. 11, 2000; Application No. 60/225,447, filed on Aug. 14, 2000; Application No. 60/218,290, filed on Jul. 14, 2000; Application No. 60/225,757, filed on Aug. 14, 2000; Application No. 60/226,868, filed on Aug. 22, 2000; Application No. 60/216,647, filed on Jul. 7, 2000; Application No. 60/225,267, filed on Aug. 14, 2000; Application No. 60/216,880, filed on Jul. 7, 2000; Application No. 60/225,270, filed on Aug. 14, 2000; Application No. 60/251,869, filed on Dec. 8, 2000; Application No. 60/235,834, filed on Sep. 27, 2000; Application No. 60/234,274, filed on Sep. 21, 2000; Application No. 60/234,223, filed on Sep. 21, 2000; Application No. 60/228,924, filed on Aug. 30, 2000; Application No. 60/224,518, filed on Aug. 14, 2000; Application No. 60/236,369, filed on Sep. 29, 2000; Application No. 60/224,519, filed on Aug. 14, 2000; Application No. 60/220,964, filed on Jul. 26, 2000; Application No. 60/241,809, filed on Oct. 20, 2000; Application No. 60/249,299, filed on Nov. 17, 2000; Application No. 60/236,327, filed on Sep. 29, 2000; Application No. 60/241,785, filed on Oct. 20, 2000; Application No. 60/244,617, filed on Nov. 1, 2000; Application No. 60/225,268, filed on Aug. 14, 2000; Application No. 60/236,368, filed on Sep. 29, 2000; Application No. 60/251,856, filed on Dec. 8, 2000; Application No. 60/251,868, filed on Dec. 8, 2000; Application No. 60/229,344, filed on Sep. 1, 2000; Application No. 60/234,997, filed on Sep. 25, 2000; Application No. 60/229,343, filed on Sep. 1, 2000; Application No. 60/229,345, filed on Sep. 1, 2000; Application No. 60/229,287, filed on Sep. 1, 2000; Application No. 60/229,513, filed on Sep. 5, 2000; Application No. 60/231,413, filed on Sep. 8, 2000; Application No. 60/229,509, filed on Sep. 5, 2000; Application No. 60/236,367, filed on Sep. 29, 2000; Application No. 60/237,039, filed on Oct. 2, 2000; Application No. 60/237,038, filed on Oct. 2, 2000; Application No. 60/236,370, filed on Sep. 29, 2000; Application No. 60/236,802, filed on Oct. 2, 2000; Application No. 60/237,037, filed on Oct. 2, 2000; Application No. 60/231,040, filed on Oct. 2, 2000; Application No. 60/240,960, filed on Oct. 20, 2000; Application No. 60/239,935, filed on Oct. 13, 2000; Application No. 60/239,937, filed on Oct. 13, 2000; Application No. 60/241,787, filed on Oct. 20, 2000; Application No. 60/246,474, Filed on Nov. 8, 2000; Application No. 60/246,532, filed on Nov. 8, 2000; Application No. 60/249,216, filed on Nov. 17, 2000; Application No. 60/249,210, filed on Nov. 17, 2000; Application No. 60/226,681, filed on Aug. 22, 2000; Application No. 60/225,759, filed on Aug. 14, 2000; Application No. 60/225,213, filed on Aug. 14, 2000; Application No. 60/227,182, filed on Aug. 22, 2000; Application No. 60/225,214, filed on Aug. 14, 2000; Application No. 60/235,836, filed on Sep. 27, 2000; Application No. 60/230,438, filed on Sep. 6, 2000; Application No. 60/215,135, filed on Jun. 30, 2000; Application No. 60/225,266, filed on Aug. 14, 2000; Application No. 60/249,218, filed on Nov. 17, 2000; Application No. 60/249,208, filed on Nov. 17, 2000; Application No. 60/249,213, filed on Nov. 17, 2000; Application No. 60/249,212, filed on Nov. 17, 2000; Application No. 60/249,207, filed on Nov. 17, 2000; Application No. 60/249,245, filed on Nov. 17, 2000; Application No. 60/249,244, filed on Nov. 17, 2000; Application No. 60/249,217, filed on Nov. 17, 2000; Application No. 60/249,211, filed on Nov. 17, 2000; Application No. 60/249,215, filed on Nov. 17, 2000; Application No. 60/249,264, filed on Nov. 17, 2000; Application No. 60/249,214, filed on Nov. 17, 2000; Application No. 60/249,297, filed on Nov. 17, 2000; Application No. 60/232,400, filed on Sep. 14, 2000; Application No. 60/231,242, filed on Sep. 8, 2000; Application No. 60/232,081, filed on Sep. 8, 2000; Application No. 60/232,080, filed on Sep. 8, 2000; Application No. 60/231,414, filed on Sep. 8, 2000; Application No. 60/231,244, filed on Sep. 8, 2000; Application No. 60/233,064, filed on Sep. 14, 2000; Application No. 60/233,063, filed on Sep. 14, 2000; Application No. 60/232,397, filed on Sep. 14, 2000; Application No. 60/232,399, filed on Sep. 14, 2000; Application No. 60/232,401, filed on Sep. 14, 2000; Application No. 60/241,808, filed on Oct. 20, 2000; Application No. 60/241,826, filed on Oct. 20, 2000; Application No. 60/241,786, filed on Oct. 20, 2000; Application No. 60/241,221, filed on Oct. 20, 2000; Application No. 60/246,475, filed on Nov. 8, 2000; Application No. 60/231,243, filed on Sep. 8, 2000; Application No. 60/233,065, filed on Sep. 14, 2000; Application No. 60/232,398, filed on Sep. 14, 2000; Application No. 60/234,998, filed on Sep. 25, 2000; Application No. 60/246,477, filed on Nov. 8, 2000; Application No. 60/246,528, filed on Nov. 8, 2000; Application No. 60/246,525, filed on Nov. 8, 2000; Application No. 60/246,476, filed on Nov. 8, 2000; Application No. 60/246,526, filed on Nov. 8, 2000; Application No. 60/249,209, filed on Nov. 17, 2000; Application No. 60/246,527, filed on Nov. 8, 2000; Application No. 60/246,523, filed on Nov. 8, 2000; Application No. 60/246,524, filed on Nov. 8, 2000; Application No. 60/246,478, filed on Nov. 8, 2000; Application No. 60/246,609, filed on Nov. 8, 2000; Application No. 60/246,613, filed on Nov. 8, 2000; Application No. 60/249,300, filed on Nov. 17, 2000; Application No. 60/249,265, filed on Nov. 17, 2000; Application No. 60/246,610, filed on Nov. 8, 2000; Application No. 60/246,611, filed on Nov. 8, 2000; Application No. 60/230,437, filed on Sep. 6, 2000; Application No. 60/251,990, filed on Dec. 8, 2000; Application No. 60/251,988, filed on Dec. 5, 2000; Application No. 60/251,030, filed on Dec. 5, 2000; Application No. 60/251,479, filed on Dec. 6, 2000; Application No. 60/256,719, filed on Dec. 5, 2000; Application No. 60/250,160, filed on Dec. 1, 2000; Application No. 60/251,989, filed on Dec. 8, 2000; Application No. 60/250,391, filed on Dec. 1, 2000; Application No. 60/254,097, filed on Dec. 11, 2000; and application Ser. No. 09/764,895, filed Jan. 17, 2001.

[1364] Moreover, the microfiche copy and the corresponding computer readable form of the Sequence Listing of U.S. Application Serial No. 60/179,065, and the hard copy of and the corresponding computer readable form of the Sequence Listing of U.S. Application Serial No. 60/180,628 are also incorporated herein by reference in their entireties.

The application's sequence listing, which the Patent Office published only in electronic form, follows.

SEQUENCE LISTING (879 sequences)

SEQ ID NO: 1 - DNA, 733 bp, Homo sapiens
gggatccggagcccaaatcttctgacaaaactcacacatgcccaccgtgcccagcacctgaattcgagggtgcaccgtcagtcttcctcttccccccaaaacccaaggacaccctcatgatctcccggactcctgaggtcacatgcgtggtggtggacgtaagccacgaagaccctgaggtcaagttcaactggtacgtggacggcgtggaggtgcataatgccaagacaaagccgcgggaggagcagtacaacagcacgtaccgtgtggtcagcgtcctcaccgtcctgcaccaggactggctgaatggcaaggagtacaagtgcaaggtctccaacaaagccctcccaacccccatcgagaaaaccatctccaaagccaaagggcagccccgagaaccacaggtgtacaccctgcccccatcccgggatgagctgaccaagaaccaggtcagcctgacctgcctggtcaaaggcttctatccaagcgacatcgccgtggagtgggagagcaatgggcagccggagaacaactacaagaccacgcctcccgtgctggactccgacggctccttcttcctctacagcaagctcaccgtggacaagagcaggtggcagcaggggaacgtcttctcatgctccgtgatgcatgaggctctgcacaaccactacacgcagaagagcctctccctgtctccgggtaaatgagtgcgacggccgcgactctagaggat

SEQ ID NO: 2 - protein, 5 aa, Homo sapiens
  misc_feature (3): Xaa equals any of the twenty naturally occurring L-amino acids
WSXWS

SEQ ID NO: 3 - DNA, 86 bp, Artificial Sequence
  Synthetic sequence with 4 tandem copies of the GAS binding site found in the IRF1 promoter (Rothman et al., Immunity 1:457-468 (1994)), 18 nucleotides complementary to the SV40 early promoter, and a Xho I restriction site.
gcgcctcgagatttccccgaaatctagatttccccgaaatgatttccccgaaatgatttccccgaaatatctgccatctcaattag

SEQ ID NO: 4 - DNA, 27 bp, Artificial Sequence
  Synthetic sequence complementary to the SV40 promoter; includes a Hind III restriction site.
gcggcaagctttttgcaaagcctaggc

SEQ ID NO: 5 - DNA, 271 bp, Artificial Sequence
  Synthetic promoter for use in biological assays; includes GAS binding sites found in the IRF1 promoter (Rothman et al., Immunity 1:457-468 (1994)).
ctcgagatttccccgaaatctagatttccccgaaatgatttccccgaaatgatttccccgaaatatctgccatctcaattagtcagcaaccatagtcccgcccctaactccgcccatcccgcccctaactccgcccagttccgcccattctccgccccatggctgactaattttttttatttatgcagaggccgaggccgcctcggcctctgagctattccagaagtagtgaggaggcttttttggaggcctaggcttttgcaaaaagctt

SEQ ID NO: 6 - DNA, 32 bp, Artificial Sequence
  Synthetic primer complementary to human genomic EGR-1 promoter sequence (Sakamoto et al., Oncogene 6:867-871 (1991)); includes a Xho I restriction site.
gcgctcgagggatgacagcgatagaaccccgg

SEQ ID NO: 7 - DNA, 31 bp, Artificial Sequence
  Synthetic primer complementary to human genomic EGR-1 promoter sequence (Sakamoto et al., Oncogene 6:867-871 (1991)); includes a Hind III restriction site.
gcgaagcttcgcgactccccggatccgcctc

SEQ ID NO: 8 - DNA, 12 bp, Homo sapiens
ggggactttccc

SEQ ID NO: 9 - DNA, 73 bp, Artificial Sequence
  Synthetic primer with 4 tandem copies of the NF-KB binding site (GGGGACTTTCCC), 18 nucleotides complementary to the 5' end of the SV40 early promoter sequence, and a XhoI restriction site.
gcggcctcgaggggactttcccggggactttccggggactttccgggactttccatcctgccatctcaattag

SEQ ID NO: 10 - DNA, 256 bp, Artificial Sequence
  Synthetic promoter for use in biological assays; includes NF-KB binding sites.
ctcgaggggactttcccggggactttccggggactttccgggactttccatctgccatctcaattagtcagcaaccatagtcccgcccctaactccgcccatcccgcccctaactccgcccagttccgcccattctccgccccatggctgactaattttttttatttatgcagaggccgaggccgcctcggcctctgagctattccagaagtagtgaggaggcttttttggaggcctaggcttttgcaaaaagctt

SEQ ID NO: 11 - DNA, 392 bp, Homo sapiens
  misc_feature (373): n equals a,t,g, or c
  misc_feature (376): n equals a,t,g, or c
  misc_feature (391): n equals a,t,g, or c
gtgggataattcagagcatgccaagatattttacttgtgacagcttagcttttaattttcttttaccaagcttcttcattcacatatgtttctaggatgaaggatactagcaaaaagaacaatatatttgctcagttcaggaagaatgatcgagacaaacagaagttgatagagacagtcgtgaaacagctgagaagtttggtgaatggtatgtcccagcacatgtagacctcacatggcttgcactcagtgacaccaaatccatgattcaatgttgatcttgagcaagtattggtcatgatacagtaatttgtttacagaatccaaaaatacaatagagaagatacatgagggcttaaacaagggatagtantanatatccatttgtatng

SEQ ID NO: 12 - DNA, 352 bp, Homo sapiens
  misc_feature (206): n equals a,t,g, or c
  misc_feature (255): n equals a,t,g, or c
  misc_feature (295): n equals a,t,g, or c
cttggtgactcagcaatcaaactgttcattttgcacatgttttgtgtttgattcatttagtcactgagtcttcagtttctctgcctgctttttgccctgctgatggggaccagcctccaggtcagcacagcaggttgagcctagagaggcaatcacagtcccaggatgaacttttttttttgtccctgaaaggggcctttccaggngactccccaggggctgctgatatgctcttccaaggctttcctgattgtntgtccacccatacccaaggggaactgatgtttctatcctntcccataggccttttctaggctttttacccacttccagcctgttttcctaggggcct

SEQ ID NO: 13 - DNA, 403 bp, Homo sapiens
  misc_feature (252): n equals a,t,g, or c
  misc_feature (313): n equals a,t,g, or c
  misc_feature (336): n equals a,t,g, or c
aattcggcacgagctgcttctttccacatttcatatgggagaatggtcagttggatggaatgaaaataaacttttcttagacaagttacatgatagaaaacatcttgaatctagttaatagtcttagctccattaattgttagaattttgtcagagtagagcaggtagaattgagcagtattgaaacaaaacaaawtcttgggttattagctttggtcttgctattcacagtgtgtgaggctggtggaggtncccaacttctctagtcctcatgtcctaccttagtaaaatgaggaattgtaccagatactgncccaagttccttccagcttaaancctgttattctaggcatcagagatggattaatcagactggccatttaaattttttagtggtacttta

SEQ ID NO: 14 - DNA, 334 bp, Homo sapiens
  misc_feature (126): n equals a,t,g, or c
  misc_feature (320): n equals a,t,g, or c
ctcctgttttctggaactcttgtttgaaaggtgatacttcctcttgcctcccacctcagatacttacagaccaataacctaaaacctaagtggagactgttgggctaaccagaggtgagctcagtnttcttaaatctgtgactctgttccagatcaacccttagtgaaatctgaataattatttcctcactttaatcagacgaaatgggagctctcactctctaggaaaagcattaatgttcttcagtcaccactgttcttccataatacaaacatacagrgcaaccaaaaaagagagtgacacccacaattaaattttnaaaatcagcaaaaa

SEQ ID NO: 15 - DNA, 373 bp, Homo sapiens
  misc_feature (253): n equals a,t,g, or c
  misc_feature (358): n equals a,t,g, or c
  misc_feature (361): n equals a,t,g, or c
tagaaaatgcctcagtcagccactgatgaaaatcaatggagactcacccaacagcagcattgcagcttctcccaggtcacctcgcggtgggtttctaaggcatgagaggaggtagtctcctcttgtttgaggaggcagtcagcttcctgaggccagggcactcccttacaagaggggttatcatttgcctccaccgtgcctgttccattagtcaaacacagtcggccagagcaactccatgcagcagccagtntgccacagagcacctcggcaaatgtttccagatcttttcagagcactggggaataactcttttaaggtgggtacctcagctgggggaaaggtcatatgcattctnccngttttgatgtac

SEQ ID NO: 16 - DNA, 339 bp, Homo sapiens
  misc_feature (322): n equals a,t,g, or c
aggaggatcacttgatcccaggagttgactggcctgctcaacatagtgagaccccatctctaaaccataaaaggaggataattgtagtactattcttcttactaaacttttttttgataatagttatttttcattaaaaatgaatgatctgtgttaacatctacttgttattattttagtagttaaatgaattactagtttaatttctccattaaattttaatggtaaacatccacagatataatctacctaaacaaaagttctttatcatcctcaataatttttaagggtgaaaaagagtcctgaggacccaaaagtttgnaaaaacacagctctaag

SEQ ID NO: 17 - DNA, 219 bp, Homo sapiens
  misc_feature (218): n equals a,t,g, or c
caaaaacttcactctagctaagctatcttgttgcctactccttgtctgtaactgagccatggcatggggctgcaaaaaaaacgcacaaccacgctgttggtctcaccttatatttatggccacaaacctaaagtgggtttcacattgtccaacaatctttctctaagcccctagttatgtcctccttcttcttttccaaaatgactattttatatttnt

SEQ ID NO: 18 - DNA, 307 bp, Homo sapiens
  misc_feature (60): n equals a,t,g, or c
  misc_feature (211): n equals a,t,g, or c
ttttctttcaagaggattttttggggaagtgggcagataaagtaccagcagattactttnatgctatcaaatattagttttaggctttgttaggactagcccatttaaggtttgrtstttctccaagaacatagtctttaaaccataagatatgcttcttcatatgtcagggattttcttatgtgtcaactgaaatcatggagtgtttatnagaatgtttctttttgttggggcataaactccattgctttttctcagaacaatattaaccactgaaatgactgctcaacctgtttagctcttttgg

SEQ ID NO: 19 - DNA, 253 bp, Homo sapiens
  misc_feature (218): n equals a,t,g, or c
  misc_feature (221): n equals a,t,g, or c
tgtagtttgtgatgttacccatagtgatgagaagcacaggtcactgcaaaagtgttcatggagaggaccctcctaccaaagaaatgacaagaatcttcctgcccagtccctgagtgttcataacttcctgaacttgcattcgaatgttccctacttcttgcccctagaatccattctccacacaacagccagattatgtctctccctgcttaaaaccnttntttggcttccattcctatttcaaataagggtt

SEQ ID NO: 20 - DNA, 332 bp, Homo sapiens
  misc_feature (313): n equals a,t,g, or c
  misc_feature (328): n equals a,t,g, or c
aattcggcacgagcaggagaaagccatcaggtcctagacgtggaagaaaggagcctaccaaagtgttggagtaaacagtggcggaggaggtgaggttttaaaaacaggaaacggagaggagttatcttcaccatgcacctacgcttctctgcaccttgtgtagctggtctccgccatctgggccttaaggcacttctgcagatttaacactttctctggcttattaaacaacaacagagggaaaccaaaagaccctggcgcaccattgctacggagaaacttgctaatacacttgctttttaaacctgcggtnctcttttgccccggncaag

SEQ ID NO: 21 - DNA, 287 bp, Homo sapiens
  misc_feature (273): n equals a,t,g, or c
  misc_feature (277): n equals a,t,g, or c
aattcggcacgaggcgaggcggcgcggagctgcccctgggcgccaggtgtttcggggtgcgggtctcgccgaccggggagaaggtcacgcacactggccaggtatctcgctaaaaatgcccctgattacaccgagtactgtgcacttgtttgacttttcatcaatggcctaaaaggtttatgatgataaagactacaggagaattcggtttgtaggtcgtcagaaagaggtgaatgaaacttttgccattgatttgatagcagagcagccctnagcnaggtggagct

SEQ ID NO: 22 - DNA, 341 bp, Homo sapiens
  misc_feature (294): n equals a,t,g, or c
  misc_feature (329): n equals a,t,g, or c
ctggttttcagatgggcttaactgggataaggaggagaattagaggtgaattaggacaaagcctctgaagagcaacttcccgaaaacagttctcaactcratctcctgctgggcagtagaagataatgaaaaaaacaaaggaagggctgcccccagtacttagagcacttagcgcacacactctcggtcgttgtcaggggctgtttgcttcttgaaattctgctaaaaagccagccaattacatgcaggctgtcccttatatcctaggtaaccagccaggcatctttccccttnagccttcctttgaagggtcttattccccttttggnccatcttttttc

SEQ ID NO: 23 - DNA, 345 bp, Homo sapiens
  misc_feature (119): n equals a,t,g, or c
  misc_feature (277): n equals a,t,g, or c
  misc_feature (331): n equals a,t,g, or c
ctgagatagcaagaccaatccttcctcttcttcctccttctcagtctacacaacaagaagacgacaaggatgaaggcctttatcatgactcacttccattcaatgaataatacagaagnttctgagaggtaactgacccaaagttacaaagccaattaaagtggtaaaaattggaccctactcaggcctgttggcttcctgaagtaacacagcaattgagtagaaacggctgctggaaatgcttcatagttaagggtcacatgaacacaatccagtnacaaatgggtccaggagctttcggacgagcgttccagtttctttcgtaacgttncccacaacgtgcag

SEQ ID NO: 24 - DNA, 362 bp, Homo sapiens
  misc_feature (102): n equals a,t,g, or c
  misc_feature (281): n equals a,t,g, or c
  misc_feature (361): n equals a,t,g, or c
aggcgacctgctgagaagtccttgtgctctgtgctttgaactggacatcaacaaacaacatggcacttagtgtttttaaactgaccaagggacaagcctggngcagcctcttccggggcctcgattaaccaggaggaggtggctgctgtgccccaacccaggtgacagattcgggtgccggcacctcccctgagtctcagagtccagggagtcacaattctacagggacaacagaaacacacaaaagtgggcataaaataatcatcgatagaaggtttgtncactttggatgtctctgtgaactgatttaatgtggtatagaaagatggttccgttaattttagaggtggtttagatatcnc

SEQ ID NO: 25 - DNA, 269 bp, Homo sapiens
  misc_feature (251): n equals a,t,g, or c
  misc_feature (269): n equals a,t,g, or c
aattcggcagagctacactgcattcagcctcaggaattacagagtcagaatagtactctctgcttttktgtaattttragggtataaaaattctaagaacagttacaaattacctcgtttctatcatcttcctccctgttttactgagragaaagccaaaacccagggtgataaagtgattggaccaaggagtacagccaggttttctttcaacatagagtctgtctaccctgtcccacccttcatcccantcatgagtctccctaggn

SEQ ID NO: 26 - DNA, 269 bp, Homo sapiens
  misc_feature (229): n equals a,t,g, or c
aggcaaggttgggattccactttctgggactcccccaggcatacctaggggctcaacctctgtacttcaaggcatctcaacgctgaaacagaacagtgacctctcaaactcagccaggcagagctattctggatgacatcctggggaattctgaatggggccatttcattcaggcctcagaaagatcctctggaaagtgggrtttatgatgtagcccagatgacacctntycgcctggcctgcccctcatcttaaccctcctggcatct

SEQ ID NO: 27 - DNA, 352 bp, Homo sapiens
  misc_feature (36): n equals a,t,g, or c
agcaaatgtctagacaatcaggctgagtcagctaanagtgaaaggttgtgactatggggatagtctgctgccttgggaaaaacaaatatgaagggtaaaactgttgaagaagggtccagcagaatcattgtgaagtgttctctttcagatggggggttgggcataggtggattatttttaagtgtaaagtccatttgtaaagccagattttgaaatggaaggcagattgttttctaggagcaagggcattgaggggaacaagaaagagtkggagacctataggagggggggcmttagttttcagcaggaagccaggggcccatctctttttttgaggctgggagggactggg

SEQ ID NO: 28 - DNA, 326 bp, Homo sapiens
  misc_feature (193): n equals a,t,g, or c
aattcggcagagctttgacaatgttcatactgttgagcaccattcttatcgaaagaagggaaggaagcaacatgggagttactggttctccttggccctatgcaggtagtaccgagtattccccatgggcagaagtaggtctccaccttatttgtttttgcacaacagagatgatgcacagggcctgagccgngaatcagatccggtgcaattgcctattaatgttcattcattcacaccttttttgaataccaactattaatacatgtgcagatacccagtttcagtamtggggcatwtwaaacattagattcctcaggtggcct

SEQ ID NO: 29 - DNA, 352 bp, Homo sapiens
  misc_feature (313): n equals a,t,g, or c
  misc_feature (319): n equals a,t,g, or c
  misc_feature (328): n equals a,t,g, or c
cacgaagtggtaagctccagctgaagttgtgctagacttgtgcttaactagggagacaggtcacacctaccaaaactcacaaaaacaaaagtgccagtttttgtcagagaaatgagattcctgtatgttccagaagttcctgttgacttattggccaattgaatgttaatcctccagaagacaggtctacatgggaaagtcgtggtacctattcaccacacagttttgggtgagcctgggaattcagtgggaggattagttgggggactttaaatgtcttgacaacagccagaccccaccaagggatgcccantcctgnttttgctgnccctgttaatttcattcctcgaaa

SEQ ID NO: 30 - DNA, 357 bp, Homo sapiens
  misc_feature (172): n equals a,t,g, or c
  misc_feature (191): n equals a,t,g, or c
  misc_feature (332): n equals a,t,g, or c
aagaaatttgtatatagcccaaacttaagactgtctcaccagagcttaaaggtgttagctctggccacacagcggcctcagtcactcttcttacatggattttgatgcaaattctgctccttttctatttctcaagatttctagccccttcgagggccscaaccctcgaggnagtccagtraaatgtgtanttccactctgccttgcctgtgctggaaaacacataggaaagaggaacagaggaggcaggcacctggaggtcagatkggcarytggattktkaagargtktggtttgcatgcctggcatgatgagcttttaggtttcatctnaacccgggcagattattttccacca

SEQ ID NO: 31 - DNA, 223 bp, Homo sapiens
  misc_feature (215): n equals a,t,g, or c
aggcgcgggaaggaaggaaggaggcgacggtgcgggagggaggcggccgttgccatggaaggagctgcaaggcccccggtgccaggctccgtgctaagcgcttcacgtggaccagcactcatgctcacgccarccctgctcagtgaatgccaggcgcgtctcgcagacaaggaagactcctgctgtggcttagacccacatttacatccagactncacgtcct

SEQ ID NO: 32 - DNA, 121 bp, Homo sapiens
  misc_feature (115): n equals a,t,g, or c
ggcacgagctgacctgattatatgaatacatgaaattatcacatgtaccctgaaaatatgtacatttattaatgtagcaacaacaaaaaaatgaagctaaaaaaaaaaaaatctngaattt

SEQ ID NO: 33 - DNA, 429 bp, Homo sapiens
  misc_feature (387): n equals a,t,g, or c
  misc_feature (396): n equals a,t,g, or c
  misc_feature (424): n equals a,t,g, or c
cctgaccctcgatcactgcccaagcccgggcctgcacatactcactggactgttccattttracagctgccagtcttcctgcccctttcacactgcagctgctgccctggacatggtctctgtacgtgttttttttttaaatgctgaggaaaatatgaagcttaaaatagaatttgttcaaattgtgaatcctggccagcggggtggctcatgcctgataatcccaggcatggcattttgggaggcagaggtgggaggattgcctgatgttaggagttcaagaccagcccggccaacatggtgaaccccatctactaaaagtacaaaaattagccgggcgtggtggtgcacactgtaatcccacctccttgggagcttgaggcaggncagtcactnacctgggaggcggaggttcagtgagctnagata

SEQ ID NO: 34 - DNA, 533 bp, Homo sapiens
  misc_feature (371): n equals a,t,g, or c
  misc_feature (416): n equals a,t,g, or c
  misc_feature (428): n equals a,t,g, or c
  misc_feature (477): n equals a,t,g, or c
  misc_feature (483): n equals a,t,g, or c
gggcaatgctaaccagctaataaatagaagtggactgggatgagagtccaggcaattgcctaatgagccccgctatacatatttgcaaaaatgtagaatgatgccattcttttttgttttggcaaatagttatttttcattaaaaatgtaatgttatgttaatattggacaaaaattgatttaataaaaatgttataacatgtagtggctattattgtcattttgtttttttagagaaagggtctcactctgtcacccaggctggtatgcagtggctccattgtatttcactgtagcctcaaactcccgaaattcaagcaatcttccaagtagctgggctacaggtatgtgccaccacacctggttaactntttattttttatggagatgcagtttcattaggttctcaggctggnctcactctttgnttcaagggatccctcccacctttgcctcccaaagtgtaggggtacaagncgtaancacccgtgctttgcccatttttttatgccagccatcaggtttggatgcct

SEQ ID NO: 35 - DNA, 277 bp, Homo sapiens
ggcagaggtaaatacagacacagctcctcattagaatggtagatgtctccctcctacccttaggccaggaagggcattttctggcttgttttttcccagggtagagggaaatcttgttccattcagcaggaaggcaagatttyaggggctcaagcttggtcgccaaccgactagcttcatgttgaggaaaaccttattttggggatcatcatcctgtacacttgggaggrgccttcaacgtggcttttgtcccaatctgstttyaaccagcctgggg

SEQ ID NO: 36 - DNA, 416 bp, Homo sapiens
  misc_feature (328): n equals a,t,g, or c
atttctggccttaactgctggtggaattagcaggagttatctataaatccctgaggcatccatcagccgactgagcgaggctgcctttttaaagaagttcactgacctcttgttaacttaactccttgttaggaaatatctaatcagctgtgagctaacacgtcagggcccaggggtctgcagaagccgggctcactgtgggctgggtttccactgtgtgcagtctggtgtctgagctgtggtgttttcctcttttcagctatctttcagatcattcagagcataaggatgggcatgtgagaaagccaggggttttgacaaccacctnccttcccactggaggcgggaggacaacggaagcggtcagccaktttctgcgggraacaagcaggcacamgggattaggaaaaaacgtt

SEQ ID NO: 37 - DNA, 313 bp, Homo sapiens
  misc_feature (148): n equals a,t,g, or c
  misc_feature (149): n equals a,t,g, or c
  misc_feature (153): n equals a,t,g, or c
tatgctttattccataaagcatggctataggacattgtctactatgtaactaatatttaaatatttatagatttttaaaagatttcttcaaccttcttttctcaccctgtttctagatctgatgcacaaaggaaaataataatacaanncccntaacctattcattgtattgttgcggtagatcgagctacatgctgcacagcaaaagaccttctttgcatttctttcaagcagaattattgctgtatattcactctgaactgggaggtgaggattggactgtgtagtgcctcagaaaatatccaggggtttt

SEQ ID NO: 38 - DNA, 365 bp, Homo sapiens
  misc_feature (321): n equals a,t,g, or c
atcaagttgaacccctccttcctcctccccacttcttataggtaagaaaactgagggtaagtgacttgtacaatgacatagaacatcagaattaggactgtcgaactccagcctccacactcctccgcaaatgttcttagggctaatacaaaactttttttaaaggcaaagaactcaaatgtactgcctttagtgttttaagtaactgtttatctataattttgaactccatatttttttctagaaaaagcaagttttataaaatctgcattccaaagtttgcataaaataccttaaatgttctaattatttccaaatgtnaatttttggkatatggrttatttttagaatgacgtggaaataaa

SEQ ID NO: 39 - DNA, 218 bp, Homo sapiens
cacgtagtactgtttttgtcagaaacaggttaagactaacaggagttttacaaaggaactgtcaaattgggatttgactagtgggaattggctgggtgataatcaactttttcttggctgactctgatcagcttcttaggcctgtgtatatacaatacctttgtgaggatatggccgattaggggaaaaactattgccaattttgcctcccctcctct

SEQ ID NO: 40 - DNA, 147 bp, Homo sapiens
  misc_feature (144): n equals a,t,g, or c
ttagtacacaaccaatatagaagtcttgtttgtttctgggttctccagcagagactttttgtttgtggcttactctgtatagcctcatgtgccttaaaggtggtggaactctagtttttgtcaatatcaggcttttcaaaactnaaa

SEQ ID NO: 41 - DNA, 662 bp, Homo sapiens
  misc_feature (6): n equals a,t,g, or c
  misc_feature (591): n equals a,t,g, or c
ggcttntgaatctgaacactggcaagttgttcctggaacctgagatctgccggctggaccaaatgcgttgtccacaatacagccgctgatgagtgtctggctgctcacctgtcccctaggggccccgctgagcccccaggctgcatcccctggcccgccacggagaggactccaccccaccctcatttcccaggggaggagccgggyctmtgggaacttgcggaggggcctgcaagtgaggaccgtggctaccagggamctggcggctgcagatgctttgtgggaggcctgtgtgcagcccttcgtcctgcccggagctgggacctacttaagcagtggagttcagcagggytgggtggagctgcatytccctcctggggtgcccamccacccctytgtgctctcacgctcacaaggggcctggaggtcccagttgctagggggccctctattcctgggtcccagatgatggaagcgcaatgttaaaaatgttcaccagaccaacctgtactggctgcaattctcaataaagcagttgagggacacacccagaacagtgggcgcttctgccagtgccgccgtgccacttanctctggccatgaccccacaggaacaggagcggggctatagggagcccctagggttatacaggaccctccgc

SEQ ID NO: 42 - DNA, 463 bp, Homo sapiens
  misc_feature (410): n equals a,t,g, or c
  misc_feature (412): n equals a,t,g, or c
  misc_feature (452): n equals a,t,g, or c
  misc_feature (455): n equals a,t,g, or c
ggcattataatgggggcaaagccccacgcctttgccaaakgtacagaccttggggactcatttgtgggcctagagatggggcaggctgctgcatagttaagagcccagctttggtttaacctgactgactcaaatctctgccacttattattattttttttgtgtgtgtttttgagacagggcctcactcttatcacccaggctggtgtacagtggcatgatcatggctcactgaggcctcaaactcctgggctcaagcgatcctcccacctcagcctcccaagtaactaggactacaagcatacaacaccatgcctggcaaatttttttattccttaagtagagactggggtctactctggtgtcctggctggtcttgaactcttgggctcaacaagtccttccgtctnancttccaaaagtgcttaaaatgccggtgtgaaccactgggnctnggactttt

SEQ ID NO: 43 - DNA, 419 bp, Homo sapiens
  misc_feature (32): n equals a,t,g, or c
  misc_feature (405): n equals a,t,g, or c
  misc_feature (414): n equals a,t,g, or c
gaaaatacaaaaaattagctgggtgtggtggngcaaacctgtagtcgtagctacttgggaggctgaggcaggggaatcacttgaaccccggaggcggaggttgtagtgggccgagattgtgccactgcgctccagcgtgggcgacagagtgagactccatctcaaaaaaaaaaaaaaaaaatctatgctagtagattacaacttcacactagaggagttctggacaaagcttttaattagtcaaactaaattaagkctcattaaaaggraaggaactactgggaaattatgcaattcaataatttagactctgktaccaggatctttcataaaaatttaatttccataatcataacctaaatgaattcttaaagaattctattaagcaatagctgattaatgggnccctggaanatgaa

SEQ ID NO: 44 - DNA, 535 bp, Homo sapiens
  misc_feature (39): n equals a,t,g, or c
  misc_feature (209): n equals a,t,g, or c
  misc_feature (510): n equals a,t,g, or c
  misc_feature (531): n equals a,t,g, or c
cacagagcagcagaggtactgctccttgtggagcagggntacccagaggcagtgtgcccagaagagcaacgcaggggcagggctgcactcatatggacatctacttttaattatatgcaaattaaggggtggattatgcagagatttccaggatgagggtagtaacttccaggtcatcaggtcgttgccacgaaaagggatggtaactnctaggttttgccatggcaatggtaaactgacatggcacactggcaggcatgtcatggaaagctgcttctgcccccctacctgttttagctagtccttaatttggttccatgtccgagccccgcctcctacctcaagaggactgaatcaaatgctctaaatcacttggttaattggcccaatggatagttaaataaattctatctccttatggcagaaggaaagcccagatctttgacaaaactggaaggtctttgccaagaccccacagttaaaccgtttgaggcctcagactgtgccttnaaccagtggatgtggatgatnaaat

SEQ ID NO: 45 - DNA, 345 bp, Homo sapiens
  misc_feature (34): n equals a,t,g, or c
  misc_feature (178): n equals a,t,g, or c
  misc_feature (234): n equals a,t,g, or c
gcttactgcagcctcgacctcccatgctcaagtnattctcccaccccggcctcccgagtggatgggactacaggcatgtgccaccaagcctaatttttgtattttttgtagagacagggtttcaccatgtgtcccaggctggtcttgagctcctgagctcaagcaatcctcccacctnggcctcccaaagtgctgggatgagccaccgcgactggccccacttaatgggttttnagaggtgggagcaaagaatgaagggaggaagagagctcccatcttttccattaccgtatttacttaaaactggaaaaaactgaaccacttgggatgggcatttcatttatc

SEQ ID NO: 46 - DNA, 269 bp, Homo sapiens
aattcggcacagcggcatcatacgaggcgcccaccagaacaggggtctggggtccgccttcctcagcctcaggccgccacaaaggattttttggagtcgccccaggcctgacggcgttaattatccctggctttcatcttgatgctcttgcaggggaaggctcaagaatgccttgtggctcgacccctgsacggagcccccagcccagcctccccgtgggttgaaaccttgatctgggcctgactgtggctgctctggggacatgccct

SEQ ID NO: 47 - DNA, 273 bp, Homo sapiens
  misc_feature (245): n equals a,t,g, or c
agaaaagaaataccaaagatgagactacagcagcgacttgtcacctcttccgtgttgctactgcctgagaacagaggttttwagtttctttaaagggttgtaaacataaaaacaaagaaggatacaacatgcaaggcctaaaatgtttactttctggccttttacacaggcagttcgccagccccctacccttacagtatgggaaaaaaggcatagaacagtccaatcacgtgggattttcttangtttcttccatgcaggcttcatcggatt

SEQ ID NO: 48 - DNA, 660 bp, Homo sapiens
  misc_feature (575): n equals a,t,g, or c
  misc_feature (618): n equals a,t,g, or c
  misc_feature (626): n equals a,t,g, or c
  misc_feature (636): n equals a,t,g, or c
  misc_feature (656): n equals a,t,g, or c
gaattcggcacgagcctacagcagctaggtgggcaatttcctttaaaagtggctgtgggcaggttaggtattgtgattggccagcaccccaaataatatgtggggacacacccttgagggactttttaaagctaaatgtggcaatgtggaaacacctttctctcttgatctctcttttcatttccatactcaaacctttcctatcttcaaatttattctatcagcatttgaatttcaagtaataagaccgtgacttgccagctatcagattttcagtgacttgaaactttgaagataagtactggtggggaatgctctttgttccattgctctggcctgtggccctatctttatacaagggtaaaatcaacacctagtcatgaaatggagcaagaggctgcaagtccggggttaccctgcctgggatagagaattagaacatgtgagattatttatatgtacagtgactaattaactcttgagggcagtgcagtccgtcttggatgcattcgagtcgtaactcactgcatatttgctgggggttctgttatgctgatgtataytaattggttttnccaagccttcattgaaccagcagacagatgtggttccagtttngggactangactaaaaanccaatgccgcattacaattncctg

SEQ ID NO: 49 - DNA, 302 bp, Homo sapiens
aaaaccttctttttctttaggtactattagaccatggctctaatttcctaagtaagggaatattttatatataacagatattttsctgttattcaaagatgtgtaagactgtcagttcatacaacttgatatggagtgagtgtcataaattaattattcccactctctggtctaataacctacaaaattattaggaaagtcacttactagcgttttacctttactctcagtatttctttattccttttacttcttcttcagccttctccttttcagagctttcagagtttcttatggacagg

SEQ ID NO: 50 - DNA, 350 bp, Homo sapiens
  misc_feature (333): n equals a,t,g, or c
  misc_feature (339): n equals a,t,g, or c
gaaataagcttgagaatgcaaagagaatactatatagcattctttttgagattgtccttgcatattcgcacatgaaaagttctgctagaaggagagccactcagtatattttratcagtgtgttaaaaatgtatttgcccaccaagcctactttcagaaggtctagtaacaatggcatcctgtgggagattctttgggaagcatcgattaaacagacctggaaggtttgggtcgatgtggaagcggaagcattgtgtcctctgcccactcccttccatttttcccatactttaatatgaacctttctcttttccctttctagactgacagatnccattnccaccacagag

SEQ ID NO: 51 - DNA, 234 bp, Homo sapiens
  misc_feature (230): n equals a,t,g, or c
tgtaagttggtgttggttatgcagaaatgtgtaacagatcaaacggtcctctcaagtgtctattagataggcaataagaactgcagtgtagctgagtaacatcttttagctgactataaatcactttgtttttaaacaagaaaagctgtgctcttttatgtgatgccttttttatttattcaggctatacctacaatatgtgaatcaaactgtttaatgaatcctggggncagt

SEQ ID NO: 52 - DNA, 337 bp, Homo sapiens
  misc_feature (35): n equals a,t,g, or c
atttgctgaaaccggcagaaccatatatgaaattnatatatacttaggaaagctgaacatacttgcttttatagaggtttttaatgaatgaatgaatggaattgaggaaagaagcttaaaatgcctcatgctttttaaattttaccaatgtgctgcagagagctttcattgggaatgaagtgtaagcctcacctgacacactaagaaccacgtgaatttccaagaaggggaaaggtattcttgcctgagaaagccccggctaatgtgtcttccatctggaaagtctttgcaaagccggttgggatgtgccaagttcagttatattttgggtgctctt

SEQ ID NO: 53 - DNA, 418 bp, Homo sapiens
  misc_feature (30): n equals a,t,g, or c
  misc_feature (366): n equals a,t,g, or c
  misc_feature (412): n equals a,t,g, or c
cttacccacaatctgctgagctcgcatgtncggggggtggggtcccgtggcttccccctgcgcctccaggccaccgaggtccgtatctgccctgtggaattcaaccccaacttcgtggcgcgtatgatacctaaagtggagtggtcggcgttcctggaggcggccgataacttgcgtctgatccaggtgccgaaagggccggttgagggatatgaggagaatgaggagtttctgaggaccatgctgctgagtgaagaggaaactgagagttgattgtgccaggsgccagtttttcttgttatgactgtgtatttttgttgatctataccctgtttccgaattctgccgtgtgtatccccaaccctngacccaatgacaccaaacacagtgtttttgagctcggtattatatntttttt

SEQ ID NO: 54 - DNA, 406 bp, Homo sapiens
  misc_feature (370): n equals a,t,g, or c
  misc_feature (379): n equals a,t,g, or c
  misc_feature (400): n equals a,t,g, or c
  misc_feature (402): n equals a,t,g, or c
ggcacgagcctgacctcaggtgatccacccacctcagcctcccaaagtgctgggattacaggcgtaagcaccttgcctggcccgacttaatttttttagatcaatcaattttaacccccttctgttcttcctttacctgactacatgcttgaatctcaatccttaatctctctctgtccctgtccccaggattaagcagttttcagcagagtgtggcaatggacaggatccagcgtattgtaggtgttttgcagaagccacagatggggtaagtcccgctggttctttgcttgggtcttcataaaaaggagatttctccaatcctgttgctgggtttttaaagcaacgtcattttcacaggggacgttanctaggaacnttgttacagtaggaggggttntnaaga

SEQ ID NO: 55 - DNA, 454 bp, Homo sapiens
  misc_feature (366): n equals a,t,g, or c
  misc_feature (368): n equals a,t,g, or c
  misc_feature (424): n equals a,t,g, or c
  misc_feature (453): n equals a,t,g, or c
ggcacgagaaaattatagtaagtaggatgttgtgacattgttcatgggttggaaaatgggctttcatactcaagtatatgtggaaacaaggggaaacaaggaaagaatggcagtcatactaccctgtcctctgcatcatcactggaaggtgtaaaatgaccttctcttccatcactttgaacgtcactccaagtagcctcactgtcattaagctctgatagtctctattttacatcagttgtagagatctctttcacatcagttaccatacaaagtacaggatgctaggtgatgccacatcctgttacaacttaatccccatatagctctgtgggcactgaggcawttcctacctttagttgggantnccacaattctcctcccctgctttagttttctcttataggcatttcagaatacttantagcttctgaaaggatgttaactcatgtnc

SEQ ID NO: 56 - DNA, 256 bp, Homo sapiens
  misc_feature (216): n equals a,t,g, or c
  misc_feature (220): n equals a,t,g, or c
ggcasaggggattttktgttgatgggcagggtggcaggaagccagacaccttggttcgggagtggaaaaaccatgttgagaaacactaagaaatgtgaatgggagaattagagggagtgggggagaggatggaggaagagtgttgaatatggttccaggtggaggaattcattcattcgtttattcagaagctgttctcctagggcacattctgtncagnatctgtgaatttagaagtgaaggttgaggcattctt

SEQ ID NO: 57 - DNA, 341 bp, Homo sapiens
  misc_feature (204): n equals a,t,g, or c
  misc_feature (340): n equals a,t,g, or c
  misc_feature (341): n equals a,t,g, or c
aactagtggatcccccgggctgcaggaattcggcacgagtttggagcactcatgtttttggagagggattttatgtaaaatctggatttccgtttttwtcttcaaaattggaagrattagcctcamtgggctggaatttcccccaggcggtagttgatggcaataaggcctggcctccccctgttgatggggcagatgcttttnactttgccacggtccacaccacccactagtcttgcatccggcccaccttcctccatttgtattgcctgcctggctacccctttcaggtctcccagcacgatccactcgtggaccaggtctgtctggcaacccagcnn

SEQ ID NO: 58 - DNA, 940 bp, Homo sapiens
ggcacgagcgggcgcgctcctgctctgcgagcccgcggggcccgtgtatagccgggctgcgcggcggcctgacgccgaggaaactgcgcggctacgggccttgggcgccgaggtgcgcgtcacaggccgcggtggcctggccacyttccacggcccgggccagctgctttgccacccggtactcgacctgcggcgtctcggcctgcgcttgcgcatgcacgtagcgtcgctggaggcgtgcgccgtgcgcctgtgcgagctccagggcctgcaggacgcccgcgcgcggcccccgccctacactggcgtctggytagacgrtcgcaagatctgcgcgatcggagtccgctgtggaaggcacatcacatcccacggcctgctctcaactgctctaccgactcacgtggtttgassacatcgtgccctgtggactggttgggtcaggcgtcacttycttgagtaaggagctccagaggcacgtcaccgtggaagaagtaatgccacctttccttgtggcctttaaggagatctacaagtgcacactgatctcagaggacagccccaactgaagagtactcataacagccaggatgctcctgccttgggaagcatgaagtctgacttgagtcacctactgaaacccagattttagacctggcctgtcattcactgatcatgaaactaaggacataccatgagctctgagccactattttcatatgtatcctgttttatttatatctttcccacctacctcagagatactagatgtgacaatactgtgaaaagcaacacatgctatataaaacattagcmctgctattgamaraagtgtctcagagaaattcagatgtcatagattgttatttctcgattgttgatgtcatagattgtcatttctcgattgttgcttcctcaatactgtgtctaactgagcaaa

SEQ ID NO: 59 - DNA, 438 bp, Homo sapiens
  misc_feature (393): n equals a,t,g, or c
  misc_feature (412): n equals a,t,g, or c
  misc_feature (413): n equals a,t,g, or c
ggcacaggtcttttgggacatgcatggattctctaacatggaagtttgcatcaaaagcaatggcctgggtgtaatgcttagcacatgttttccacgctcattatgtcagtgaattcatttttctccccaagacgttcagccagatgcttccacctcaggtttttgggttgcagctgttattgctggtgtttaaactaggatgccctacctccctcattccccagaaatagatgtggttaaaggaggagtgggtagggtagtctatttgtgacttttgctgaaattttgcccaggtatgggagacttggtggggaaagaagtaggtctgggagtcaaaggtgaagtagatggccaacaggagttggcacagagccaggtttgaagattgggganccacacggggcaaaggggnntgaagggggcatgaaggaggagaaa

SEQ ID NO: 60 - DNA, 387 bp, Homo sapiens
  misc_feature (294): n equals a,t,g, or c
  misc_feature (381): n equals a,t,g, or c
  misc_feature (387): n equals a,t,g, or c
ggcacagggagactccgtctcaaaaaaaagaaaagaaaaaagaaagctcatgctagtatcttccaccagttcagtcccccctcccccagccactgtactcaaatagtcaacatctgctgtttcttcttcagcctcatgctgttcccttcgctctctggcccccttgtccaagatactttttttctctgcaactcaaatctcataaactctcaggtgcttatgggcaacgttccagaccgggggggccgcccaaatgagctggagcctcccatggcccacctgggaggagccgangagaaggtgggaggcccccagtgttggggtcgcaagaagaagaagaagaattaaagggggattggtggttcggggggcgggggggtnctcccn

SEQ ID NO: 61 - DNA, 343 bp, Homo sapiens
  misc_feature (241): n equals a,t,g, or c
  misc_feature (295): n equals a,t,g, or c
  misc_feature (324): n equals a,t,g, or c
ggcacagagaggatctactgtgagccccaggcctggtgttccgtgaaaaatcgccacatttaaatcctgcgctcccccgtgctccctctcgctctctcccccttcctttttcccttccttccttcctccccgcgctctctgtatgccttaataggagtgagtgaaagggaaagagtggggtggagggagaagatattggaagccgaggtaagaagcacattttatctaggtctcaaaactncaagcgtggatgaaatctgtttcaaaaagaacatccaaggtacgcgtttttttnacccaaaggagcccaaatggacctttgtnatggaggagcaaagattat

SEQ ID NO: 62 - DNA, 579 bp, Homo sapiens
  misc_feature (555): n equals a,t,g, or c
gggttgcctcgtggcacaaaataattgccagagctccagccttcacctcctcattctgagggaaagtcagaggccagcgctggctaggtgtctcctggaagtcttcccaggaagcctcgaaacccttctttttatatcccactggccagaacagagcgaaatggccataccttgctgcaggggaggctgggaaatgtggctgtccagatggatgagattctgttacaggcataaggggagcggggggcttaggcagtgattctctaagtgtctccatccatttyacagatgaggaaacggaggccccaagagaggcagtgactcaccagggggcccacggcaggactgagcaccagagccaggattctcacctgaaccccataatctccatgctgctgatgtgcaagtctcagactctgcaaaatccgctgcaccccctcgggctgtgaacatttcaaatccatgtgtgccaagttggagcagcccagggccaggggcacggctggagagtggacccagttcctggctgtggacccatggctgagggtttactgnttgtggcttcatttcctcatctgt

SEQ ID NO: 63 - DNA, 348 bp, Homo sapiens
  misc_feature (343): n equals a,t,g, or c
gtacacagcagctaagcccgtatttcattctgctcagatgctcagaactctagacatttgcctccgcaattatatcccattctcctggaggaccaggaccatgtcatattcattgctgaacactgcacagtgcttggtgtggggctggtgcctgtgagagtctgcacaatgtgtgaggcccgctggggcccacgaarggtgcaccaggttcccagcctcgctccatctcagagtgtcctgctgtgtacggcggtggcccacggatgccaagagagctgagcactgtcacacctgaaaacgctgctcctcctgggtccccgtgaaccaccgggaaggggtcttncccct

SEQ ID NO: 64 - DNA, 165 bp, Homo sapiens
  misc_feature (165): n equals a,t,g, or c
ggcacgagccaaaagataccactaaaatagctgcccccatttaaaaaaaaaaatcagcctgtcattagcaatgggcttcccattgtggtggatgagatttagctctcaactattttaggagactgtagagatagatatgttacgccagttttttttttttttttn

SEQ ID NO: 65 - DNA, 344 bp, Homo sapiens
  misc_feature (271): n equals a,t,g, or c
  misc_feature (281): n equals a,t,g, or c
  misc_feature (341): n equals a,t,g, or c
ttacatgttaccttctttcaaagcttttcctgacccccttactactcamcctctactatccatcctggaagaactggcccctcttctctctgccctgtagacttagcatagactgctttcacagcacatatgttgtttcataatttcccatttttactcctatctccttccttttattattattgtatcataactacttgaggtcaggtcccttgcctctctcatctgtggttctcaactgccccaaagtttgagacatatgtcttgcttngtattatatntagagacttctctatagccacaagaatgtaaagtctttgaaggcaaggagtaagggattnttt

SEQ ID NO: 66 - DNA, 351 bp, Homo sapiens
  misc_feature (271): n equals a,t,g, or c
  misc_feature (338): n equals a,t,g, or c
ggcacaggttggaagtgatggaaggatatgtttttccgggggtaggattaaactagtgcatggaagtcacagtgggtgtaatagattatttttggatatttttaggtagactgggatgaactagtagaggtgttttgtagtcttgggtggaaggtttgagatcccagattttgaggttcatgattggtaaaattgtggcggtgggtgattgggagaccatcataaggttgctggcattttattttgtcatgtaagggcattaaaaaaatcnagcctyctttttkgagacgggtctgccccgttgcccaggcaggaaggcatggcakgatcaggctcanggcatctcaacct

SEQ ID NO: 67 - DNA, 187 bp, Homo sapiens
cacaggagctgctggaacctttctccagagcttcatgatttgtttgcaacggcttgaccagtctgggtagtcttgcttgagattaggaaaattaatgttggcatagagcamaggtgagatggtggacarctggcccaactcctcatccttcttcccagcgctgaagatccgctggttataaggaaaa

SEQ ID NO: 68 - DNA, 611 bp, Homo sapiens
  misc_feature (22): n equals a,t,g, or c
  misc_feature (29): n equals a,t,g, or c
  misc_feature (451): n equals a,t,g, or c
  misc_feature (595): n equals a,t,g, or c
  misc_feature (611): n equals a,t,g, or c
atggatacccccggatgacagnawttcgncacacagtttggaaccggctacactgcgggatgccttagccgccttctctgagcccttgggagcaatagcagcaaccaggcctccagcattggcaccatctcctgagcgcccctgcacctctttcttgctagctgccccctcacttggagtgaacagggaagtccctggagtgggtttgctagtgtctttgccactcttactccttttggattttgawttgccttccttcccttgaggacctggcactggggtcacaaacttgatgttgtctggtagtgtggccacagcattgggagccggtatccccamctcctttgagcctgacatttccagtttctgctggtccttttccagatcggcgtccargtcaatgatgagattccctactccaatgtcccattcatccccactgtcgtatgtntcaaccgggkttgcatccamtcctttccctccggaggctccactgctcaaggacatcttagagtcaacgtcccacctcaagattcaaggctcttccttgcccccagctttcctattttcagcttcagctatgttctcagacctnccacattggtcagtan

SEQ ID NO: 69 - DNA, 326 bp, Homo sapiens
  misc_feature (57): n equals a,t,g, or c
ggagctgctccccaggccacagcagacagcactgctgagaggcagcggccgcgcggngtgacgcaaatggcaggccctgggaatcccgccgcctcccacctagaattgtcctacctcccccaccccaaacaccagcttttcctggcgccccaggcccagaacgtgggcccagagagccttgctggggtctctggggcacttggtcttgctctgaggctggaaggagaaggaccaaggtgcsgcatcactcggcctcaaggamccctctgccctgcccagcaytggccccgamccgtgctyccgccgtctgcccaagaacaagacct

SEQ ID NO: 70 - DNA, 375 bp, Homo sapiens
  misc_feature (270): n equals a,t,g, or c
  misc_feature (336): n equals a,t,g, or c
  misc_feature (364): n equals a,t,g, or c
ggactgacagtaattcrgccacgagacccgaaaagccctccattctttcctgggtttragggtccttctcctgcacccaccccagcgcccagttcagctcaactttcagaaatctggttcacccccaatccctttctcataactgcttccaagcccagacaaggagacagaccccagaagatccctamccctatttccgcacctgaaatcgcaccacgggaagarctttgctcattagagtcaataaggcttagagtccargcgcctgtncgagggagcaggtcatcaaccttgttacccacctggttttagacagggacctgagatttggggttngggttggggttggagaggagccagttgncctgccccttg

SEQ ID NO: 71 - DNA, 414 bp, Homo sapiens
  misc_feature (86): n equals a,t,g, or c
  misc_feature (374): n equals a,t,g, or c
  misc_feature (388): n equals a,t,g, or c
  misc_feature (391): n equals a,t,g, or c
  misc_feature (411): n equals a,t,g, or c
ggcacgagcttaaatccacccccagcaaggcctgccccagaaccacccatcaccctccagtgcagtcaggtggaccagaggtcctnagagaagtggcaggagctcagacttaggttgagtcctggctccgcttcttgctagctacgtggccttargtgaattacttggcttctctgagcctcagtccttcatctctaaaagggcaagatgatcctgacctcattgactgttaggaggatccaaggacatctcacatgggaatgggagtaacaacatcaatgctggctttcatctggaagccgtgctcccctcttggagcacccccagcagggccccctytgcccakggttcaatggttccatgagggcagcccntggcccatggggancanttccggggccagcccccacnttg

SEQ ID NO: 72 - DNA, 369 bp, Homo sapiens
  misc_feature (311): n equals a,t,g, or c
ggcacgagggtcagtaggcactgttccttccttgcttggtgggtttggtggatgtctctgttctctagaggatgccaggggccagtsaggcagccaggagagcatctgccctggccactcatcagggtcctctcgccagcyttctcccacgtggtggagaacacggccttcttcggcgatgtggtgctgcgcttcccgaggattgtgcactattactttgaccacaactccaactggaacctcctcatccgctggggtatcagtttctgcaaccagacaggcgtctttcaaccarggggccccaytcgrcncatcctcagcctgatggcccaggagctggggatcagtgaggaagactccaacttccag

SEQ ID NO: 73 - DNA, 325 bp, Homo sapiens
  misc_feature (289): n equals a,t,g, or c
  misc_feature (318): n equals a,t,g, or c
  misc_feature (322): n equals a,t,g, or c
ggcacaggtttctgtggctacaacacgaatacctgaaaatctctgatgtggctcaacccaccatctgacagcttaggaagccgagctctgaggcagactgctgccaactcagacggtggatggagttgctctgcagggccgagaggatggcatacagtgacgagaagttcttgaggatccggcactcctggggcgggaagagcaggaggcwtgagggtgcccagcacacaagtgacccgggaacagaacgctggtggggaagaagaggagcaccgccttcgcgcagctncaaccaagccccagcttccaacaggcggnttcncgc

SEQ ID NO: 74 - DNA, 452 bp, Homo sapiens
  misc_feature (433): n equals a,t,g, or c
  misc_feature (434): n equals a,t,g, or c
tctgcccttcatagcaaatcacccatttagcagctgaaacagcaccattttattatctcacaggatctgtgagtcaggagccagggtaccacagcctcaagggctctcaggaggttgtaactgagggttgttttttggggtccatcatcttggggtcttcttctgagcccactggttattgacagagctcagtgccttacctttgcagggccagggtccccgttctggccagtgttggctagggacacttgcagttcccagacgctgccagctcgggactctgttccaccgtggtggtctgcccctacagtgctgcaggctgagctgacatttgtccatattcagttattcgggccagtgggagaatcatctttcagaaagggtttggggccggtgcgggggctcacgccttaatcccagcatctgggaaggnnaaggcaggttggatcact

SEQ ID NO: 75 - DNA, 436 bp, Homo sapiens
  misc_feature (362): n equals a,t,g, or c
  misc_feature (408): n equals a,t,g, or c
  misc_feature (426): n equals a,t,g, or c
acagcgtatacaaaggccccgtggcctggaggcaaagtgcgatggaaaagtcttgccttttagggcaggagggccagrgctggggcaaaggagggtcccagattccccaggctaccaagttttgccatggtagaactggatcacaagggcaagcctgagtcctgccagaaacattcacatctgcacttaaccaggtcacttctgcctttgtgtggataatgagaagttggagatagttgagctaacacacaaaccactgcgagcgctttccagagggtaatcttttcatcctgacagctgtcaggtaagcactagtgttaacctgctttttcccaaatgagggaaccacaaggaagacagtnaggtcacgatctggttttttttttggggggggggagggcttttganacggtgttcactctggcncgagtggtgg

SEQ ID NO: 76 - DNA, 524 bp, Homo sapiens
  misc_feature (73): n equals a,t,g, or c
  misc_feature (481): n equals a,t,g, or c
aaactcccctacttcagggaacaaaccctggagctccaccgcggtggcggccgctctagaactagtggatccnccgggctgcaggaattcggcacaggccacagtcacatgagtgatcttgggacaaggtccttcagtgcagggcagtattcatatgaggtggccctggccaacttcttgactacaactcatgagagaccttgagccagaaccacgcagtgagcgactgctggatacctcaccctcagaaactgtgggagataataaatgattgttggttttatccactacattttagaataatttgttacacagcaatagataactaatatwctccatcattcaacaaatatttacttattmagtatctacctgtttcaagaattatatagttagttgaataattattacaactcaaggcttcttgttttcagataggatcatattgaactactttaactttttttgtttgtttctttgnttgtttgtttgagatggagtttcgctcttttggccaggctgga

SEQ ID NO: 77 - DNA, 357 bp, Homo sapiens
aaagcccttacctcttaataccatcattttgagaattaaagtttgaaaatatgaattttggagggacacaaacatccagatcatagcacttgctaaggtttcataatgagtctgcatttgaatctttgtctgtttgactcaactgtctttccttgcagtcaagtgtgagttacctgttcctcctctattatccactctaacggcttctgtgtctctcttcagggaacctcagagtggcttcgtcactgattgcacatttacctttttgtagtatctgtctgtttgacttcataatgactaaaagcaacttcagacttctatatggttggaacctagcacagtgcataatattcaata

SEQ ID NO: 78 - DNA, 352 bp, Homo sapiens
  misc_feature (294): n equals a,t,g, or c
  misc_feature (339): n equals a,t,g, or c
ttttctgccctaccgtaagcctcatgggagcaggggctgtgactgttttaattcaccgttctgtgtacatcacccaacatagtgtctgtccggtggtgggccatcatcaaacagtggtagaaggaaaggagggagggaaaagagtattccaaaagttggtcaggtagagagaaggaaataatgtattataatgctttgagcagagtattaggatggggtcaggctctgtatgttattggagcacacattgtagcagttaacttggggtggggggtgatgtaatcagtaacactncgaaaagatgagcagccgggcgtgttggtcgctcattacaggatngccaccaagtgtt

SEQ ID NO: 79 - DNA, 444 bp, Homo sapiens
gcggccgcccgtagcctaattgcgcagagggctcgccttgcacctcctcttsccccgccgccctccctctcgcccagaaaggaggacggacccagctgcaggctccgagctggtttattctgcggccgaggattacatttatgcacgaacgggcttactggttccagattccccacttgggcacaggcataggaggcttgttttccaaattgctggttttaattgcacctgcctttcagattacctctgggaatctgtgggaggagccgagagggtggaaaatgtttcttagctttgcaaaaggaagaaaactttgtcacccagcgggagacctcagccacgagtaacccggggagacaccagaaccgggacgggctttgactgatttgcctacgagggttccgtaggaaagggcgcacgcgtgtgaaacaacaccgagcttga

SEQ ID NO: 80 - DNA, 409 bp, Homo sapiens
  misc_feature (335): n equals a,t,g, or c
  misc_feature (344): n equals a,t,g, or c
  misc_feature (369): n equals a,t,g, or c
  misc_feature (390): n equals a,t,g, or c
gaagggctttcccctaagatcctagaaatcacaacaggaaggcaactatctattttgtccgccagtaaagtcaactgactgagtatgacagaaaattgggttgatctgatgttctcaaacatggccgtggaaatggccttgagagcagaacgtgtgttgaagactagtccaggcattccatcagtccaccagtgaatcagatacaactaggagcttccgtcacagaggagcttactgtagttacaaaaacagccagagtcagccgggcacagtggctcatgcctgtaatcccagcactttgggaggctgaggcaggtgaaatcacctgaggtcangaattcganaccagcctgggccaacatggtgaantcctgtttctactaaaaaatncaagaaaagaaaaaaaaaa

SEQ ID NO: 81 - DNA, 247 bp, Homo sapiens
  misc_feature (126): n equals a,t,g, or c
  misc_feature (146): n equals a,t,g, or c
tttaaattatcactcttttttatgcaggawtatgtggtaacaagttatatggtaagaaatttaaatgtaaagatttkacctaacgttgattcagattgtagagctgtcagttgaaaagggaaactncatgtttagaaatttgagtnctgctgggcgcagtggctcacgcttgtaatcccagcactttgggaggccaaggcgggcggatcacgaggtcaggagatcgagacccggtggaaccccgtct

SEQ ID NO: 82 - DNA, 289 bp, Homo sapiens
  misc_feature (261): n equals a,t,g, or c
  misc_feature (268): n equals a,t,g, or c
aggttcttgtgcctccactctacacccaagccccccattgccaccagcctttkccccagctccccctgagcacagcccctcctggcagccatgtgcacagatgtacccgcagcagcctctgcctgcacacagagacacggacaagccagtgccctgtccacgtggggcagcccgttaaactacagagccaacaaacaagccaggacacgaggacatactgggttccacgacagagtcctgcacaaccttcacacaggaggntggccgngcgcggggtttcaggtctgtt

SEQ ID NO: 83 - DNA, 377 bp, Homo sapiens
  misc_feature (293): n equals a,t,g, or c
aattcggcasagcaggaattggaggggcccatgagcatggccagtatcacaggctggaggtgctgctgcgctctgaccgggcctcttggggatgagcccatgtcaaccaccttgcctccgatggggtcgggcccacaggttacctttgtctgtccatgaccacaccttcctccccgacctcatccaaatctctttcttttccaagcccctgaatccttcaggctgcaggttttgtttaaagcagagctggttgagttgcataggttgttgcgttgggactagatggggtgttncaaagagttgggagttwaaaaaacatraaagggtatttattaaggagaaaccaaggggtgtaattcttcccgttcttaatatgg

SEQ ID NO: 84 - DNA, 228 bp, Homo sapiens
  misc_feature (47): n equals a,t,g, or c
  misc_feature (71): n equals a,t,g, or c
aattcggcagaggtctcgctggccgagccggctgccccacgcacggntcggcagagtcgccgtccacgggnccagcccgaccaccagcgtgtccagcctgacggagcgcgcggtacaccggcacctccatcctctcggtaacctccagcgactcggaatgtgatgtatgatagccaaggccgccctcctccctctccttcccctcctcccccactccttcccctccgc

SEQ ID NO: 85 - DNA, 411 bp, Homo sapiens
  misc_feature (271): n equals a,t,g, or c
  misc_feature (364): n equals a,t,g, or c
ggcacgagcgagggctgggaactgcgcggcggggactgcgggcgactccggcatccgcgctggcggcagcggtcgccgcgccgtgggaagctatggggacgcgccctttctcggggtgcccattcagcggcggctcggagctccctgccccgctgctttaggaagcgatcgtggagcagagtcactctctgaagactcccgagacccattcgactcgggaccctcatcgccgaccctttcccgggctcccggaagcgtgaagaagagccgncctccggaamgcggcgaggagcatgggggagarcggcggccaacgcagcggcggcggaagggcgcgccctggytcccktggttggggytgtgnttcttgggcgcaaggaacgcggcttccccgaggaaattacaatggcg

SEQ ID NO: 86 - DNA, 443 bp, Homo sapiens
  misc_feature (367): n equals a,t,g, or c
  misc_feature (373): n equals a,t,g, or c
  misc_feature (394): n equals a,t,g, or c
ggcacgagggagatatttgggcttgaatcaggagtttgtcctacaggtgtcgcccttgatctcaggatgctaccagggctttgttctcgggatcctcgcacctggagagtgaagacgggcatgacggcaggtgaaggggtttgctgtgaaggaagaggagataaggcatttccaggaaatgggaaactgcctcctcctacacatggggcctgtgctcagaatgggcttagttcttataggatggatgctcagtattccttaataaagtagagttccattcttttcctgagtctgtcttttackgtgttaaaaacctgaactaggctgggcgtggtggctcacacctgtaatcccaacactttgggangctgangcgggtggatcacgaggtcangagatcgagaccatcctggctaacaacggtgaaaccccgtctactaaaa

SEQ ID NO: 87 - DNA, 439 bp, Homo sapiens
  misc_feature (405): n equals a,t,g, or c
  misc_feature (419): n equals a,t,g, or c
  misc_feature (433): n equals a,t,g, or c
cgcgttcccagcctcggagggacccccgagttcctgctccagcgccctctaatggccaagacctggggagcgcaggagaaaagcaggtggggaaaaggccatcaatggatggatacccaaggacacttccatatgttcggtggggagggcaaggggggcagagcgtgggaagatgcaccaagcccaggcacccgaggcccgaggtgccagccgtagaggagagaacccaacgcawttccatatgttcaagaggcagatccagggagacactgtgcagtaggagagaaatatgagaaccccaatctcaggattcaaggtctggggatcactgaaggaaaggctctgtaaactcctgttcgtttcttccctgcacagctgcaagatcacaagacagagacgcataanctgcaaaccaagtnttcccagacatgtnagacat

SEQ ID NO: 88 - DNA, 363 bp, Homo sapiens
  misc_feature (353): n equals a,t,g, or c
  misc_feature (358): n equals a,t,g, or c
ggcacgagtgccatcctgttccccgtagtctggtccatccggcatctccaggatgcgtctggcacagaggagaaggtggcagtgaacctggccaagctgaagctgttccggcattactatgtcatggtcatctgctacgtctacttcacccgcatcatcgccatcctgctgcargtggstgtgccctttcagtggcagtggctgtaccagcccacaggaaacaacccgtacctgcagctgccccaggaggacgaggaggatgttcagatggagcaagtaatgacggaytctgggtttccggggaaggctctccaaagtcaacaaaacagccagcgggcgggaattgttatggntcacntccac

SEQ ID NO: 89 - DNA, 376 bp, Homo sapiens
  misc_feature (54): n equals a,t,g, or c
  misc_feature (375): n equals a,t,g, or c
ggcacgagtgccttccagggcacctgcagctgggctgtgcagacctgaggtctnaggctaggatggggtggggtggaaacacattggaacctgctcttcagtggcccccagcacatgtggacagagccctttaagcaccccagaaacacgggggaagaaagccggtcccctcctgcctcttctgccaaggccttaagcctgcctttccccaccggctctggccagtggctgttcccacccggagcctgggactccactctgctgtcacagcaccgcacacgttgggcagggggcaagcaggggaaagggcagagaggagatggcaggaggaggataaaatgccatgcctggcagcagccgaagctgggaaaggang

SEQ ID NO: 90 - DNA, 234 bp, Homo sapiens
  misc_feature (142): n equals a,t,g, or c
  misc_feature (144): n equals a,t,g, or c
ggcacgaggtagtaggcaggaaggcaggagcaaactagagagagagagaagaaaagtcgtggccttaccaacaacccaaaagccctgaattctctggtgagataggcaactctggaggttgaggcagctgtagctcagccgngnattagaaggatgattctagatatttaaaatcaacagcatccccacccacgtaacccaccttcaggaaccagtaactttaaccaagagaac

SEQ ID NO: 91 - DNA, 399 bp, Homo sapiens
ggcacagcggaaactgaatctgagatgactctttccccactttggtgtctctacagagacccaccttcctgggatccctatattgtacacactgggatccccacacctctccaggacctccctgtttgcccggggctggttcctgtccagtgggggatgtcactgatggtgcccctaccccattcccacagtgtgtacctgctgctccacctgcagracctggaaagtgagtaagcagccagcctctccgcagcgtgctggactctcactcggaaagagcttctaaccaggagtgggcacctgaccctggggctccctttcagctgcatggtcatagggaggggtcaggaggttaacccttttttaacagcaaacacagtagcttacagttcctgtggg

SEQ ID NO: 92 - DNA, 290 bp, Homo sapiens
  misc_feature (287): n equals a,t,g, or c
ggcacagctgagttcctgcaagccttggcaacctccaggactgcagtgtggcatgatgtgggaccagactgtggctctggagggcagtgcagggctctctccaatgcatctctctgccttcagcacggaaaccagaaaacagggtttggaggaactgagtcccaggcttgcatgtggataataaattttatatctgcaccagatggcaggcagcttattaaaagaatgggctttartgtcagctagacatgggttcaaatctgggccattatttgctcagtggaggntct

SEQ ID NO: 93 - DNA, 352 bp, Homo sapiens
tttttaaatgttctagttcagagtcttttaaatcaccaacaaaaatgggaactagcctgatgtttgcccatttgttctgcctgctgggggctgcatgctagaacaatgttgatcttcagctgaagacccagcctctgggtttcagggtatgtaagcccagcccagagatgtccttagaactctttcattcttgttccagagctgatagtagggaagacaggtattgaatacctaattccaacaggccaagtagaagatgcttgttgccagggttaacatgaccawttccttaagtcttgaaggstgaaaagagctgtctgggtaaagattgcaccttacaatgatccttctt

SEQ ID NO: 94 - DNA, 554 bp, Homo sapiens
ggcacgagctgagcagagacaagggctgcccacactgggactggtagaggaagccggccctgacggatgggtggtctcgcccttcctgggttcatcctgctgcaggtgggcctgagtcgcagatcaggaagcaccgggaagatgcaggcctgcatggtgccggggctggccctctgcctcctactggggcctcttgcargggccaagcctgtgcaggaggaaggagacccttacgcggagctgccggccatgccctactggcctttctccacctctgacttctggaactatgtgcagcacttccaggccctgggggcctacccccagatcgaggacatggcccgaaccttctttgcccacttccccctggggagcacgctgggcttccacgttccctatcaggaggactgaatggtgtccagcctggtgcccgcccaccccgccaggctgcactcggtcgggcctccacaggcatggagtccccgcaaaaacctggcccctgcaggagtcaggcctggtctcacgctcaataaactccggactgaagatgcaaa

SEQ ID NO: 95 - DNA, 400 bp, Homo sapiens
  misc_feature (331): n equals a,t,g, or c
  misc_feature (344): n equals a,t,g, or c
  misc_feature (351): n equals a,t,g, or c
  misc_feature (369): n equals a,t,g, or c
ggcacgagtgaaggtccatgaatggcgaggaaaaggcttttgtccccaggcagagtcagtcaaggacccagacctcgtgtctccggcatggggaggaccagcagtgatccccacggcttccacgcggtggcgccgtctccccacggctgcttccaaggcctgctccgggctccgcaggctgtggctgtgttgggagactcctggtgctggagcagttttagcgcttggsgcctcccggtttcaggccttgcaaggaagcccgggagccgccactgcttttccctgtggccctcccamctccaggcaaccaactgcgtgcccctgttgccantgctgcccggaantaattcntttttttttttttaattnaaaaaattaaagggtttaaaatggaaataat

SEQ ID NO: 96 - DNA, 679 bp, Homo sapiens
  misc_feature (1): n equals a,t,g, or c
  misc_feature (3): n equals a,t,g, or c
  misc_feature (4): n equals a,t,g, or c
  misc_feature (81): n equals a,t,g, or c
  misc_feature (593): n equals a,t,g, or c
  misc_feature (601): n equals a,t,g, or c
  misc_feature (610): n equals a,t,g, or c
  misc_feature (654): n equals a,t,g, or c
  misc_feature (673): n equals a,t,g, or c
nannggaatcttcccctcactttagggaacaaaccctggagctccaccgcggtggcggccgctctagaactagtggatccnccgggctgcaggaattcggcacgagatgtagtagaaacacagtaggaagattttagtcattcagactggtctctctctttctggatttatctcctaccttgatcaaatttgtctgatttagtggtcatttgttcattcaatgcaggaatcatgtggatcaagacagagaacttgtaggacagttaaatctccagctggccaatagcctaggctctaatgtggcacatgtattcagaatgaagcatcacttgcacctctaaaatttatctacttaacccagggagacctaactgagctcctcctgatgtcccttggaaagtattagtaacactaagaattcttggccaggtgcagtggctcacgcctatattcccagaactttgggagaccaaggcaggagggatcgcttgaggccaggagttcaagaccagcctgtgcaacatggcaagacctttctctctattaaacaaaaacaaagaattctctggcaacaatttatgkggctgagttgntycctttnccaaacagnctaagtagagctatgggggcctaccwtagaaaaggggccttganaacatttcacaggaggttntttcaa

SEQ ID NO: 97 - DNA, 433 bp, Homo sapiens
  misc_feature (131): n equals a,t,g, or c
  misc_feature (355): n equals a,t,g, or c
  misc_feature (367): n equals a,t,g, or c
ggcacgaggttgctgagatgtcctccttgcagcagcctcccaggttttcttcccccttcctctcctgcttgctctgattttccaagagcaagtccccatcaggccctgcctcccagttcctcccgtgggangctcaaggacgagtttcttctgccctggtctgggtggcttggccagatgagtgamatgacctgaccccgaagtgaggaaatcccaagtggggagccagggactcgggagcttctgcccactaaggcccagccagcaargcctggcccctctgagacagccagcatctgcgaatcaggaggcaggagacgaacgggcatcacttggatgacagcatgtgtcagancagacctgagtnctgcacatcacagccctgtgaagggcgaggaaacagattcctcagaatgaatgatttctccacgca

SEQ ID NO: 98 - DNA, 448 bp, Homo sapiens
  misc_feature (62): n equals a,t,g, or c
  misc_feature (409): n equals a,t,g, or c
  misc_feature (420): n equals a,t,g, or c
ggacccagttctgacctatccacggggagcagcgggggttaccccgacttccctgccagccncgcctcctggctggatgaggtagaccacgctcagttctgacccaggcccggctcaaccctgcacctcacacgagggagctgcccctgggtgggcggctcggggctgctggggtttccgaggaagtggggccagggcgtcaaggagggctggtgccttcggagcctcccactgccgaccgcacagctccctctctgggggctgagggacccacctggcccctcctctgacacagggctggcccgccaagtggccttccagcaagccagctttttttgtaagcaaatttctcccctttattgaccaattaactgagcacttgctgcyatttctagacatgaaatgtcancttgctgaagnccaagcccagcccagcatagcccgaagg

SEQ ID NO: 99 - DNA, 402 bp, Homo sapiens
  misc_feature (40): n equals a,t,g, or c
  misc_feature (385): n equals a,t,g, or c
aacaaaagctggagctccaccgcggtggcggccgctctanaactagtggatcccccgggctgcaggaattcggcacgagcactgcctccccacctcaacaccagctccctgctccccaagccccaaggaactgtctccttccttgccccctcatacccagtccccagatctttctctccccatttgcccccttggtggccctgatccctcccgatccccctcctcagtgctgagcaagggccaggcagtaacagggcagtatcgcttcctggcccggagtggtggctacctgtggacccagamccaggccacagtggtgtcagggggacggggcccccagtcsgaraktatcgtctgttattttttaatcaggtaagcaggaggnggggctggggtggctgt

SEQ ID NO: 100 - DNA, 382 bp, Homo sapiens
acccgggcaagaatgagacctaccagtattatggcttctcgcataccgtgggccgcctccgcaggatcgctggtcctcggtggtaccccgcgtggtggaactgaacaagaactcgaacccggacgargtggtggtgcctctggacagcatggggaacccccgctgcgatggccaccagcagggttacccccgcaagtggaggactgatgacgccccgctctagggactgcagcscagccccagcttctctgcccactcatttctaaktccagccgcattttcagcagtgccttctggggtgtccccccacaccctgytttgggccccagaggcgagggaccaktggargtgccarggaaggcccaagaacctgttggttccc

SEQ ID NO: 101 - DNA, 345 bp, Homo sapiens
  misc_feature (268): n equals a,t,g, or c
  misc_feature (280): n equals a,t,g, or c
  misc_feature (324): n equals a,t,g, or c
ggcacgagccaatatccctgtgccttagtttcttatctctaaaatagaattactgggagtattaaatgagaagccaccaaaagtgctaagaacaacgtcttgcacacaataagtcatcaatcatcaataaatgttaactattgttatgttttatctttattttttcagacaggatcactctgtcgcccaggtttgagtgcagtggcatgctcatgggctcactacagcctcaacctccaagggctccaagcagtggctgccacctcancctccctagtanttggggaccacaggcacacgccagcacacgtgggccatttttgnattttttttggagagacaggg

SEQ ID NO: 102 - DNA, 310 bp, Homo sapiens
  misc_feature (124): n equals a,t,g, or c
  misc_feature (162): n equals a,t,g, or c
ggcacgagaaagacagcaaactatgtccaaattcatcaaaatcacaataaatgtgaataattaaattcactattaaaatagaaggactcacctactggagttttaaactatccagctgtacgcnttgcatgaaggtatatcttaatgcaatatacacttgcnttaaatgacacaagacaggcgaaaataaacataaaaagaacaaatgaacaattttttaaaaagtaaatatagcaatattaaccatcagggcaaatgtattagtaaggttctctagagggatgggaactaataggacagattatattac

SEQ ID NO: 103 - DNA, 276 bp, Homo sapiens
ctgtctcctgctaaagaaataccttctgtctatgcaacttttctttccccctttctatacctctcttataagggcaaagcatttatagcctctgagttctaagaaaccatgggagcacggtgatctgctggtgagataaccgagataacagggcccatggtccaggtgccaacaccgaggacccttgttcctttatgtgcacagaaagaagcattaaagagagttgtctcatttctggttgggcgcagtggctcacacctgcaatcctagcacttt

SEQ ID NO: 104 - DNA, 420 bp, Homo sapiens
  misc_feature (20): n equals a,t,g, or c
atgtgagtttcactgagcgnctgcacccctagagctggggaggggctgaagctttcctcactgcgatccaacacatttagggtttcctgccgaagtgggcagagaaccaggccctcattagggaaaatraaagcttcaaagggaaggttttattattctcatatttccatatggtagacaagccatattcactggctgatcattagaaacataaacaggatttcactgaacgttgtgagtctcctgttgcagacctgagtcactgcatgggtctctaactgtcacgtgtatagtataagcacagccatgtgccatacggatgttttggtcaccagtggaccacatacatgatgatggtcccataagattataataaagctgaaaaattcctatttcctagtgatgtaatgatgatctgac

SEQ ID NO: 105 - DNA, 408 bp, Homo sapiens
agaaatttttttttttttttttttttttacagaaagacaatggtgcttttaatgaaacttctttcaaatctgtgaacatgctagctgtgaagtacatgcttttattctttccataggacatatttccaaataatgatcacagtattatggttaataagatgctggacagatgcgtagccaaagaatattacataacaacaaaatctcatcaatgatatatcaaatgcaaatttactaagacatcaagrgaatatctgtttgtagttacatggctaaaaacaagacattattacagtaaycargtccataaaactagaaaaaaagcactgtataacaaaaaggccttttagaagctattaaatgaacaaacattatagataaaaaaagggcgccgctcgcgatctagac

SEQ ID NO: 106 - DNA, 612 bp, Homo sapiens
  misc_feature (545): n equals a,t,g, or c
  misc_feature (580): n equals a,t,g, or c
cgacaggtgcttcttaaatgttttctttgagcaggaattggtccaggaattggttctcaagttagaaggaaaatttgaggggaagaacttgttttttctccaatcagtctctgattaaatagttattaggaaaaactccttgcttatgtctttgtattgcacatttttatatatgtatatatgtgtaaatagagatatttatatattcacagacaaacacgtgtatgcacatttcacaatggaggaagaagggatatggtgtgcactgaggtaaagtgagcagggatacagaagagagctggagcctcacagtctgattctctcattgtacataacctttagggtctttgtttccctgagttctctggtatggggcactgttggcttgggctggtaccctgttattctctgtgatgaagggattcactggaggtaaaaacgtaatcatttccaaaggttgagaataaatgactttgaggaaagggtgttcattatccgttgcttctatattataatcagttgaactacaaaaaaaaaaaaaaaanaaaaaaaaaaaaaaaaaaaaaaagggcggccgctntagaggatccaagcttacgtacgcgtgcatgc

SEQ ID NO: 107 - DNA, 571 bp, Homo sapiens
gcgaccgctgcccgccttaatcgactgaagaagaaggagtacgtgatggggctggagagtcgagtccggggtctggcagccgagaaccaggagctgcgggccgagaatcsggagctgggcaaacgcgtacaggcactgcaggaggagagtcgctacctacgggcagtcttagccaacgagactggactggctcgcttgctgagccggctgagcgcgtgggactgcggctgaccacctcgctcttcagagactcgcccgccggtgaccacgactacgctctgccggtgggaaagcagaagcaggacctgctggaagaggacgactcggcgggaggagtctgtctccatgtggacaaggataaggtgtcggtggagttctgctcgcgtgcgcccggaaggcgtcgtcttctcttaaaattttcttttttaggtgatttccttcctgccaggctccgttgtaggggttacagaacagtcgttcccgcctcacaacctgtggatacagctgttggggcagaagagacgggaccagctgctggccacatttcctgctttattttaaaaggtagtat

SEQ ID NO: 108 - DNA, 429 bp, Homo sapiens
  misc_feature (11): n equals a,t,g, or c
  misc_feature (13): n equals a,t,g, or c
ggaccgcaggnanattttttttttttttttttwcaagtttgaaacatcacatttataaatcaatgtgtagggcagagaagaaaatgttagggggacacatacaagattgccatccagggcacatttgttctatcaattcccatccccactccttcaacagattttcagccctagatctcttggtcccttaagaaaaggcagctgtgtttggtgtcttttttcttaccctgtgtttggtttctgttagggtacaggctttctgttgggcaccaacgaggaaggatccagctgaggctccctcattgctgcatttcaaggtcaccagaggacctggattgttgcaggagggcctaggatgctctggaggggccatttcacaatttctcagggggctcaggcaggtgatgggggaggaaccaggagggacag

SEQ ID NO: 109 - DNA, 502 bp, Homo sapiens
  misc_feature (427): n equals a,t,g, or c
aggctgagaaaaagtccagcctcctttgaagagcctggctacctttcacctgaacaaaacaagaattctgatgaaaaatggagaatgtatgtggagcaggcacccggagtgtctatgccaggattttttttcagtgcgtttcaccggttatatttttgtctctttaccttacaagatatgtggcacgtttgcytaaaacaagccttgctttctgatttctgtgcactaggcacttaaaccttgcaaatgtcgcttacctaacagtcactgtcaaggagtacctggctaaagaatctccagctagacaaagtagaagtgtctgtgctctggcagttgaatatattgtatcaggctcaacagcacctttcaccaaaggatgagacttcacaaccattagatcttcytttattttgtttttattaaaaanaaaaattttaacacaccattgctaacttgaagccattagatcttcttacccccaataccacaaaagtttagtgga

SEQ ID NO: 110 - DNA, 576 bp, Homo sapiens
caccagtcccgctgcattctcggccgggctctagggccatggtccccgccggaggaagcgtaaggctgaggccgcggtggtcgccgtagccgagaagcgagagaagctggcgaacggcggggagggaatggaggaggcgaccgttgttatcgagcattgcactagctgacgcgtctatgggcgcaacgcgcggccctgagcaggcgctgcctggaggccccagagcttccagtaaaggtgaacccgacgaaccccggacgagcttcgaggtgacgctgctgcgcccggacggcacagtgcgactctggactgggattaagaaggggccccacgcaaactcaaattccctgagcctcaagaggtggtggaagagttgaagaagtacctgtcgtagggagatttgggtagaagccctcatgctgaggtttgaaatgggaagtggggggcgcgaccgctgttgaggaagagaaggcattgatcttggtgtggctacaagtacccacctggcgtgggtagctcacgcctgcaatcccagcactctgggaggtcgaggcaggagtggatggccaccaaagg

SEQ ID NO: 111 - DNA, 906 bp, Homo sapiens
  misc_feature (269): n equals a,t,g, or c
gaattcgacacgagatatttttagtagaggtgggttttcaccatgttggccaggctggtttcaaactctggacctcaagtgatccgcccgccttggcctcccaaagtgctaggattacaggcatgagccacctcgcccagcctgcttgctttcttttcttttcttttcttttttcttttcttttcttttctttctttctttccgtctctctctctctttctttctttctttatttttagatacagagtctctctctgccacccaggttnggagtgcagtgggtgcgatcatagctcactgtagcctcaacctatagagcataagtgatcctcccacctcagcctcctgagtagccggggcgacagacactgtgccattgcaccttgctattttttttttttaatttctgtggggacagaatctccctctgttgcccaggccagtcttgaamtcctgggkccaagcaatcctccctcttggcctcccaaagtgctgggattatagggatgagccaactcgcccagccaattgcttttttaaaaatgtggagcagataggtcttactttacagatttctttgacgctttttataaagttgtagtaaattattcaagatttggctgaagatgagttttgttgcataaagaatgaattttcactgctgcatatgtgagaagtaagaaattaatcactttttttttttttgagacagagtctagctctgtcaccaggctggagtgcagttgcgtgatcttggctcactaaaacctccgcctcccaggttcaagtgattctcctgcctcagcctcctgagtggctgggactacaggcacgccaccacacccagctaatttttgtatttttagtagaaacggggtttcactgtgttggccaggatagtctcga

SEQ ID NO: 112 - DNA, 598 bp, Homo sapiens
gggaatacccaagacccttttgccatccacaaacagtggtaccactgtgctagtagtcattatattcttcaccgtcatgcactaggtttcatttaagaatgtgcatgaagacaccataaaactaatgcttttattaaaacttgaaccatcttaataatattttgtatttgacaaaatgggaagtattaacatacatataaagcagttctgcataccaaagtgcagtgattgtytcaaggaatggtgccttctggattgaaccagagactgcagaatcatgcatgggtaaaagatccmttcaaagtgcaaagtaggctgggcatggtggctcacacctgtaatcccagcactttgggagcccaatgcaggtggatcacatgaggtcaggagttcgagaccagcctggccaacatggcaaaactccgtctctactaagaatacaaaaattagccaggtgtggaggcgcatgcctgtggtcccagctactcaggaggctgaggcaggaaaatcgcttgaacctaggaggtggaggttgcagtgagccaagatcatgccactgcactccagcctgggcgacagaacaagactccatctcaaa

SEQ ID NO: 113 - DNA, 578 bp, Homo sapiens
  misc_feature (375): n equals a,t,g, or c
  misc_feature (578): n equals a,t,g, or c
gaaaccccatctctactaaaaatacaaaattagcagggcgtggtggtgcactcctgtaatcctagctacttgggaggctgagacaggagaatcacttgaacccaggagccagaagtcgcagtgagccgtgatcatgccattgcaccccagcctgggcaaaaagagcgaaacyccatctcaaaaaataaaamcaaaaaacaaacaaaaaaaaatgtgatatcataagacagaccttttcccttctcatcagtgactggaattaactgcccatgtggaaygggttgtgggtgttggttcctttactgggtcatcgtggtaaactgcaaggtttctgctgtgacattgaaggcagacatcaaccctctaagacatttntttcctatcctctgggaatattactttttggacaatcttggtccattggtaagctcatgggaatttgtcagagtttttttgtttcttttggctcatgtttagcatcgattggcagagtgtttggagtcatcctcagaaaggaattacagtggttcggaggtgttttctgtagtgggccctcatttgggaatcgatgctaaacn

SEQ ID NO: 114 - DNA, 637 bp, Homo sapiens
  misc_feature (14): n equals a,t,g, or c
  misc_feature (24): n equals a,t,g, or c
  misc_feature (84): n equals a,t,g, or c
  misc_feature (630): n equals a,t,g, or c
tttcccaccctggncatcctggcnttagcaggtgtcagggatagcatcggggaattctaagtgaatgaggacacaggttcaccnttgcagtcagtggaaaaagttggtgagggactgaatccttgttctgttgtttatccatgaagcctatatatttctagtgcaaaaggcccagtgggtctcaaaacattcttggaggggtttgacacactgctattagtagtgactcataattccacgattccctgggatacagagaaggcaggggggtagtactgtttgaacaaaaatcttcccaagaccctggcaaagagatcttccttaggaatcagtggcatatgcgtttatgttctttaacagggaaagtaaaagtgagcgcacttttttgaagctcataaatactcatgtgactgtaaatttagaaatgttaattaattgggcctaatgtttgatctggaaaagtacttagcagtcaccaggaatttgccttgaactgactcgaaccacaaatcagaaccgtatttccacaatttaattkttccatgagacaatcataaaaactctgctaggattatattactaaaacctttatatcccattgcattggatatgtttgtaggtgagtaatgntaaattt

SEQ ID NO: 115 - DNA, 453 bp, Homo sapiens
  misc_feature (33): n equals a,t,g, or c
  misc_feature (371): n equals a,t,g, or c
  misc_feature (388): n equals a,t,g, or c
  misc_feature (450): n equals a,t,g, or c
cttgatttcccttctcagaatgtcttttatttnaagtgtgatggtaaaattatactaaaaatgcatttgtcaggacttgaaagacagtgagagtgattcaagctcagaggaagagcggagagtcactacccgagttattcgccggcgtttgattataaaggtatcctgtagctggatcattatgtggcattgctctactattagaaactccttccttgtggttgtagaaactccttccttgtggttgtgaaatttcagcatgcttgataatgaaatggctttgtgtaatttttttgcacccttgaaagcttgtaaaaacaacaacccaaaaagaaaagaagccatgttgcatggtattctgtatagggccnctttggatatgtgggcnggtgtaggttttttttgaggaattcttgggcctttgtatccccgcttttccctggaggaagngtt

SEQ ID NO: 116 - DNA, 535 bp, Homo sapiens
  misc_feature (461): n equals a,t,g, or c
  misc_feature (489): n equals a,t,g, or c
  misc_feature (509): n equals a,t,g, or c
tagattggttgaaaactcaagtatttgtttagcctcacacattttctctttttgactctttacttttttccttcttcttttcctgtaaaaggttgccatccaaatagcaatgcctggtgggttgaagcagtggaagtatttgagaacagtaaaagaccttgaagaggatgtatttttatttwatttttaattcataaagccatctttccactgccacaactaagctcccctcctgaactcaccagtaggaagatgggaaaaggcagttgcctgcttctatttctttgtaccacagtgcattgtttacctctgtgggccctctctaggtggactgttcttaaacctaaggaaacacaaactgccttggactggatccaattttcccaggacaggctgggcaaactttagggcatcagggtttttgggggaaatttcttgggagggactttaaacataggganggttttgttttttttggttacagggggnaaaagggctttttttaaatnggaaggggtttttccaaaggggattt

SEQ ID NO: 117 - DNA, 479 bp, Homo sapiens
  misc_feature (52): n equals a,t,g, or c
  misc_feature (57): n equals a,t,g, or c
gatggcgctctataaccccctaccgcccacggtaaagcccgccccgcggccncttcnccktgggggccgcttggarcccgtttcctgtgggtaactggaacatagcctaggtcsgggtacccaaacctggttgyagctcgtaaccactcggaacgtttatgaaaatgcagattcctggwtcccacctaaacgcactgaatctgaatctgaatctgcagtggagggagaaatgkgcgtgaaaccgaaagtctgtctttaaactacttgggagaatctgtcatgcagccatattgagaacatctagactaaatagatgattcataagtaccgatcagtttataatatcctactagaaagtcaactccgaggtcgaggaccatgtctgccstcgttccactgcatctgcagccttctggatatgcctggcacatagtaaatgctcaataaatgtttgctggatgtgtgactagaaaaaaaaa

SEQ ID NO: 118 - DNA, 508 bp, Homo sapiens
  misc_feature (508): n equals a,t,g, or c
tcgagtttttttttttttttttttaatagtaatagccaatgtttattgcatcttcactatatgacaaacgttgttcatttcacttttcctggcatcagtctcctgctttataaaataataggtggatgaatggatgtatggacagatgcgtggagagatggatggatggatggatggatggatggatggatggatagctgtttgaatggatggttagatgttcagacaaggaagaatataccatactctctgaaagatatttcaccaacatattgagtcttgttgcaattcctctcttttgtgtagttgcaagtacgatcagcagttttctgaattggaaatgctctcgggacagccttgatccaacagttctgataattaatgagttcytgccyataaagtactttaaaagtacagtgttaggaggatattttatgaagaaatacccyaattactgaaatatgtacagatatgcagtgttcctcccatgatttttaaatggatttan

SEQ ID NO: 119 - DNA, 375 bp, Homo sapiens
  misc_feature (268): n equals a,t,g, or c
aaatatatatcatagtcatttaaaaaattagtttctgctatgaggcagacttagcttgataaatttcaaatagcctttctcaatatcagaattttttttcttttgttactggttcagtaacaatcaacaatatcaagcaattagatgaattaatgaaagccacaggatatatgatatctgttaatagagaacattcagaaatgaaaaaaaaatttgccaacttccttctagagcaaaacattcttctggagcacaattctcattcatngaatatccaactgtgaaccactaaaggaactgcccagcagatcgccttaaagcagcagttctcaaatattttggtcttggggaccctttttacactctttttttttt

SEQ ID NO: 120 - DNA, 468 bp, Homo sapiens
gggtgcagagaggaagttgcattttaactgaagttcagaacagcttcctagttggggtcatgagactgcctttctttctttctttgttttttatgcaatatattaatatgaagccatcttcccccttcattgctttagatcagtggtttgcagttgggggcagttttgcctccaggggatgttaggtgttaggtaatgtctggagatatatttgtttggttgtcaccactgggagatgctgctggtatctagtgcaggaagccaggggatgctgttaaacatcctacaatgcacaggacagyctctgacaacacattttacccatcctaaaacatcagcagggctgctttgagaaactgctatagataaatgaaaaccaggactagcaacaatccctgtttctcactaagcaktttttagctttccgtttttatatgtctccggtgtattttctttactgcatttcca

SEQ ID NO: 121 - DNA, 492 bp, Homo sapiens
cccggaccaattttaggattcctttagccagtgaccttggtgtgaccttgtacttctgcagcattttataccttctgcggcacacccttgtagtgggtcgaattgtgttcccccaaaagatatgttctagtcctaattcccagtacctgtgaatgtgacttatttagaaatagggtctttgcagatgtaatctagttcaaatgaggtcatactggattagggcgggtcctcatccaataactgttgttcttattagaatagggaaatttggatgcagagacacagagaaaatgccatgtgaagatggatcagagacagaagtgatgcggctgcaagccaaggaatgtgaagaatggccagccaccaccggaagctaggggagacgccagcacagattctccctgagagtatccagaagaaaccaaccctccaacacctggatttcagacttctgaccttgagaagtgtgagccaataaaacaactgcagtgg

SEQ ID NO: 122 - DNA, 461 bp, Homo sapiens
  misc_feature (64): n equals a,t,g, or c
  misc_feature (94): n equals a,t,g, or c
ggaggaagaactgaagaaactcattgatgctctatagagaatttycttmagcctagtaagaawnggactgatcyggcgtwctgtttaggggtancmcccaataygtcatgacactgtgtgggcatatggaacagagcaaccgagaactgcatacattgaaccttgtgttagcattctctctctatctcatctggccgagtatctttttccttttattttctttctttttggtcaactggctagactaaacaaagtataagtttgaaatgaaatggtctagagggaaatgattcaaattttttcataattcaaacaaaagttattacactaaaagtattatagtaacgtattgtccttccgttaacagaaacatcacaattcaaaagtgagttttcttattatagtgtgattaagcctagttctgtatctcgtaattgtgtatagcatggtaaaaaaaaaaa

SEQ ID NO: 123 - DNA, 187 bp, Homo sapiens
ttaaataacaattctccatggaattccgtcacatgacaaatgccctccagggggtagtggacggagggcatctagggtgtagggggaggtcggctgatatccaggaacactttgatcactggccaggcatgccttgttacccctcttccgcaccccgctcacttacctgggaggtagggggccacag

SEQ ID NO: 124 - DNA, 395 bp, Homo sapiens
aactctacccctaataatttaaaatattttgcatttattattatcaatgattagtcatgtctgtagatgcgagctttattaaggaatctgcaatttcttacaaatcttaatcmtacactggatctcaattctttattaaaagtagttaaaaacaaaacaaataaaacttccttcaacaacaaaaaatgagctacagctgtcaaacctgtttttatgaggrggtacattattacaccattaaggaagtcttcagtcacaatccttggaaaacactgttctctgaatcagatatctcttttccatgccaatataaacacaatgctggccagctgtcaggamcaaaatgtaaaatgttcactcaagcaccaccacctrgaactgaggccacagcttct

SEQ ID NO: 125 - DNA, 558 bp, Homo sapiens
  misc_feature (163): n equals a,t,g, or c
  misc_feature (171): n equals a,t,g, or c
  misc_feature (242): n equals a,t,g, or c
attattttaatcctaagattgcaattttaatagttacagaattcttcacactcaggctaagtttatatataaacatgccaagtttacctttgacatgttcacatggactacttctaaacaaaatcttcaatatctgaataagaatatgtgattttaataattnagctaggntctaacaattttacactggtaatttttagctgtttatgttatttctaactgcccagatatttgtggttccngattatgttttccagtattttcactattttctcagctctgcattttgtggaaatatttcctgtatattcgtttaaatctgataaataggttaacagacaagaacataaaaaagagtcctgcagaattcaaaagaaaattccctccagagtgacataacatttaggcatggttattcaatcaatttctaatctgtcctgtgagtaacaccagagaccttgcctagtgtcatactgactttaaaagcactttagactgcctttgatgcactgctgtgccagtacaatgatttaccatcttacactgaggctgataatt

SEQ ID NO: 126 - DNA, 567 bp, Homo sapiens
  misc_feature (129): n equals a,t,g, or c
ctttcagcagccccagtggccattctttcagacgaatgccttcaagggcgacagytacagaacscaaatkgtagcytkgacggggccaacmctttccagtcgmaytacmagcgattcactgttgctacnttcgccctyctggactcagsctcccagrgagccytcagrgractggtttacttgttctgcagcacctctgcctgccacacctcagggctggagacttgctccactgcatgtagcactggcactacaagacagcgacgatcctcaggtcaccgtaatgacactgccaggccccaggacatcgtgagctctccggggccagtgggctttgaggattcttatgggcaggagcccacacttgggcccacagactccaatgggaactccagcctgagacctctcctttgggcggtccttttgctgccagctgttgccctggtccttgggtttggtgtctttgtgggcctgagccagacctgggcccagaagctctgggaaagcaacagacagtgaatgggcccaataaacaatcatttcmaacctactgaaaaaaaaaaaaaa

SEQ ID NO: 127 - DNA, 753 bp, Homo sapiens
gcaattgtcagaccaagaagtctgggctgggtccagtccccgatggagccactgataacagaggcaccagcttcctcctggaaccagggtctctgagggccacagaattgtcacgtctccctgagtctggatgcagggcacccaacaccctccctctttctggggtttgggtctcctaggcccaccctttctaggacaggagccgctacctctgggatggactgcgtgcctgtgtggggcaggactgccttgcgaggagggcctggcaggagcaggggcttggagtggggctggtgccgggacagaagtgggaaatagatgggggccccaacaccgaagctgccctcacccctccatcagggctgatcgtacatacctccctcctcggccccctgagattggtatggggcacagaaggcagggggtcacccaccctattctgttctcttctcccagcctcccagcatgtgcctggaaccttaaatgkgcacagccagggtggctggcatgggactggcactctgtacctccactccgtcaccagggacagccccgagggggtgaggagaggggccttgtctgcaattcccagagccagatcttcctcatccaagcaataacgggacgagggagccagggccaaggacactcagggacactgttgggcagcggccccacatggtaatgttttctttagagagaagaaaaaacaactggctgtaaacgtaaattatatttcttggagaaagaaaa

SEQ ID NO: 128 - DNA, 322 bp, Homo sapiens
  misc_feature (44): n equals a,t,g, or c
gcgacgagtcagtatttcgacttcgcgcagggcgcggccgcatntacagcaccctcctggaggacgggactttggtctggttattccccgctgctgtgacagcgcccatgacagcagctggtccccactggcacccaggaagtatttatccaatgactcaatgaatctgccgccggatcgcccgggactgctttcactttctgtcagtccagaagtggaraccactcccccggcccttgcatctgggmttccttgtgccctgccttggacagttggctgcagtggaagtgacgctgtgactgccctgtgcccaagcttaaga

SEQ ID NO: 129 - DNA, 735 bp, Homo sapiens
  misc_feature (161): n equals a,t,g, or c
cacaggagccgctctgttcctgggcctcggaagtgatgcctatgggtcccctcaaaccctggtcctctatctgctggtcctggcagtcactgaagcctggggccaggaggcagtcatcccaggctgccacttgcaccccttcaatgtgacagtgcgaatgnaccgccaagcacctgccaggctcccacgtggcacaggcctgtgtgggccactgtgagtccagcgccttcccttctcggtactctgtgctggtggccatggttaccgacacaacatcacctccgtctctcaktgctgcaccatcagtggcctgaagaaggtcaaagtacagctgcagtgtgtggggagccggagggaggagctcgagatcttmacggccagggcctgccagtgtgacatgtgtcgcctctctcgstactagcccatcctctcccctccttcctcccctgggtcacagggcttgacattctgktgggggaaacctgtgttcaagattcaaaaactggaaggagctccagccctgatggttacttgctatggaatttttttaaataaggggagggttgttccagctttgatcctttgtaagattttgtgactgtcacctgagaagaggggagtttytgcttcttccctgcctctgcctggcccttctaaaccaatctttcatcattttacttccctctttgcccttacccctaaataaagcaagcagtwmttgaaaaaaaaaaaaaa

SEQ ID NO: 130 - DNA, 336 bp, Homo sapiens
  misc_feature (291): n equals a,t,g, or c
  misc_feature (317): n equals a,t,g, or c
  misc_feature (319): n equals a,t,g, or c
ggcacgaggtcttgccctcaggstgaaggtttttcacagtggggcctgctgcctcctttatyttgattataactcggaattattttctcccccagcattttactatgaaaattttcggccaggctcagtggctcatgccagtaatcccagcactttgggagaccgaggtgggcgaatcacctgaggtcaggagctcgagaccagcttggccgatgtggtgaaactcgtcactgcttaaaatacaaaaattaagccagacttggtggtacagccctgtggtgcccagctaantcgagaggctgaggcggggaaaatcngnttgaaacccgggaggca

SEQ ID NO: 131 - DNA, 404 bp, Homo sapiens
  misc_feature (350): n equals a,t,g, or c
  misc_feature (394): n equals a,t,g, or c
  misc_feature (402): n equals a,t,g, or c
agcagcatcctaccagccgggcccagagcaggcaagatggacaatgctccatcacctgaatgcgccaggctgtgtcctagagagaagcttccagaagcctcccaacttcattagcccctgcagagggatgatgactccagcctctgtaggttcctgcttgagaaaactcaatgctgccaggcgaacttactgtttgttccagccaaaacctggtgacagggagataggccctggaacccctctttgagcagcakttctttagaaggyttgcaattgtgggccaggcatggtggytcacacctgtagtcccagsgytttggaggctgagttgggtggatcacttgtcgtangagttcgagaccagcctggtctgcatggcaaaaccctgtctctnctagaatnca

SEQ ID NO: 132 - DNA, 310 bp, Homo sapiens
  misc_feature (278): n equals a,t,g, or c
ggctctttccaccatttcctgttctgttctgcagaactggccacatgtcaaaaggctttggagaaattacagaagttcttggggtagacggaacctacatcaargggaggcagatggggatgagaaaagcattcctgagtcaaggaatggaaagaaagattgctgctgtcctctcaccaaggacactctaaggccaggggcagatcttctgccttggctggcctctgttgaggtgggtaaggaaggaaggaatgctcagcttggtgttctcagccccnttgctgagtctgcggaccagagctacagctgt

SEQ ID NO: 133 - DNA, 1173 bp, Homo sapiens
aaaaagtaggaaaagtgttagaggacaaaatgggagtaggggagaccctcagttagtggtgacagttactaatggatttaattaacttcaatatcccttctgtgcactgaggaagatgtctgacaattttccttaagggcagtcaggctttttagttttctggagtcaggtaggagtggggagacatgttcctacctccctttgctgggtcccaaactattccacctttacttaccccagacctgaagattcaaggggaaacccatgacagtattgaggatgcccgcacagcccttcagctgtaccgaaagtatctggagctaagcaaaaatggcactgagcctgagtctttccacaaggtgctcaagggtctttatgagaagggcagaaagatggactggaaggtgcctgagcctgagggccaaacaagtcccaagaatgcagctgtcttctcctcagtgctggcgctctgactacccttcccaaagaaccacggccctctccctttactgttctatagccccagaactgggagatggcttcctaagttggctataccttgtccamttccagtactggacgtgctcagggtctagggtcacagatggtgctattaattgaactggaacacagcagaattgttgcaaaggttctaggagccagattcattccttcttcattctttgcaaaacagtggtacagacatggagtctagaattgacccagatggaaagtaattggtattcttaatatcctgggtgactaatatccaggcagagaagctcctggaaccataactgtaagttcctagctggctagggattgaagtcctggacagtgacagaggataccacagtagttcaagacttagcacaagtcaccaactgcttcagggatacctggaggggccagcaagtagagtgttggtggcccaagcaaaccagtgttgccaataccattgccaaaagggcctttggatcctggacaaagcttggctgccggcttcatttattcctgctgatggctgagaagcatctgtcttccatcccacttgcctgtcccaagttttgttccattttttaaaaatttgttgtaaactgcatgttttataaaataaaaataaaatatcgtttgttatttatctcaaaaaaaaaaaaaaaaaaaaaaaaaaaa

SEQ ID NO: 134 - DNA, 366 bp, Homo sapiens
gctataccatctaggtttgtgtaagcacactatgatgtttgcatgacaaaatcgcctaatgacacatttctcagaatgtagttggaggaaaaaaattgaaaggagagtattacttcatgacacaggaaaatcatttgaaatacaaattccagtgtccataaataaagttcactaggaatgtgggccatgctcattcatttacatgtaatctgtgggtagtttttgtgctactgtgggcagaattgaatacttgcagtgggaacttgratgggctacaaggtgtatttgagtacctggcccttcacagaaaaagtttgctgacctggattggatgtgcttgtgtgtatcacaggaagcttcaccagg

SEQ ID NO: 135 - DNA, 297 bp, Homo sapiens
  misc_feature (297): n equals a,t,g, or c
gccatgggaagaaacggggtgtttccagttttgtgactctcgtgagtaacattctggtgcacatttgtggacagtttgtgtgtgaacattagttttcatttctctggctcaaattcaactgytgggtcatatggtacttagaaaattattaccatttccccaggcctttcctggaaaaaaattatttaagataaatattctgtagagacagggcagccaaaggtggacaacattttctctttttttccattgtttccatttttagttgtaagtgtatgtttttgggtagggggaatn

SEQ ID NO: 136 - DNA, 453 bp, Homo sapiens
gaattcggcacgagattttctgccagtgtgtataaacagcccacaccagggactttttgtagatactgttagtcatgttaagcagatgaacagggtgcatataaagtgtttgttgaacatgagagttggttgtaggaaaattcccactgagcccagtgctgcacacatattcagcactcgtgaaccaggccttctgctagattacaggaatagaaagataataaatcccagtttctgccctttaagggcttatgttctaggagagggtaagggtcatgaaatgaaataaatggagtagttttattagtgarcckggttkgttyccaaaggccagaaactggctcaaggaaaaaagagaattttttggttcatgtatctgaaaattccagaagtagcctttgactctttctgttttcctctctgttggcttcatccttaggttacatctttgtg

SEQ ID NO: 137 - DNA, 574 bp, Homo sapiens
cccccgggctgcaggaattcggcacgagattaaatcaggtcactcctttgcttacaacacagtgcgtttagaggtacaccccatgtctccacagggcacacagcatccgatttaatctggatccattccagcgccttcctctcccagtcacccagagggccccaaccccggcggccctttcttcctcaaatgtcctcggctctataccgtgcctgggtcttttctctttctctctgcctggaacattccttctttccccttttgtcttgcctactcctgtttacccttcaagtttcaagttcatgtcactgtctcagagaggttttcctgtgctcgctctgtttctctcaggaagccttgctcttttccatcatgcctctaatcacagcttataatcggatatttatttctgtgtctacagtcttgccctgccagactgtaagccccatgtgggcaggcgctcatgattgtttctgattgtttcacgcatgctgctaacccagagcctgggcccaaagctagttagtactcaataaacaatgcattgaaaaaaaaaaaaaaaaaaaaaaaaaaa

SEQ ID NO: 138 - DNA, 526 bp, Homo sapiens
  misc_feature (320): n equals a,t,g, or c
  misc_feature (466): n equals a,t,g, or c
gcttgctttcagtgttcagtctaaaccataggactatatatttgtcttagcataatgccgaacatgcaagtctgcttaaactatagtcttaagatttgtgtgttttgggtttcctctacttcctctatttcctgtcttttttgggttataggtcagatgggttctactttttattcccatttcagactgtgggagagcttctaaaaataccagtgtccatccctgcccctaggatctagttaatttttaaaagctctctgtgtttcaaatttgcatgtgtttctgtatgtttgcagtatctccgtgtgttttcaaatctnctgatggrgcacttcgtgtactttaacccttggtctttccattgcctgtcccatttttaaattccctttttagtcttaatagctgcttgagttaggacctctggaagcaaaagtgggataggatgctgacggggaattgtaggctngatggaagaggatgtttctatattaaaaggtcatggcagatccagttcctaggcatacct

SEQ ID NO: 139 - DNA, 533 bp, Homo sapiens
  misc_feature (33): n equals a,t,g, or c
  misc_feature (440): n equals a,t,g, or c
cacggggtaaaagtttcccacccgtttttggtngggtttggggccttaaagsmccccagaamctataacccccacatatccatgaaatgaaagtcagaatttggcacatgtccagataacctggttccagacctamcagccccggccctcatttccycgtcagaaaggtcacccttgagataccttacctatttataggaactagataattttgaaacttccttttgaactgtgcagataaggaactaagtaatgttttattattcaatatgctagcatttactctataatcccttttgaaatgtgagaaaaattgtctctgtgtttgaagaatgccacatctttatgcaaaatataatacagttgcaccaagtaaaagttaatgaaatgcaaaggatattgtttatactaaaagaccaaaaagaatgtgactgtttctnaggtgacttcttcctttttgcagtaattagagcacttttttctcctgatccttctaataagataaataacagaatgcagtgtgaaagcttggc

SEQ ID NO: 140 - DNA, 474 bp, Homo sapiens
  misc_feature (4): n equals a,t,g, or c
  misc_feature (104): n equals a,t,g, or c
ccgnctcgctgggccccgagacacccagcagggtggcatgaaggtccccacgatcagcgtgacctccttccattcccagtcgtcctacatcagcagcgacaatnattcggagctcgaggatgctgacataaagaaggagctgcagagtctgcgggagaagcacctgaaggasatctcggagctgcagagccagcagaagcaggagatcgaagctctgtaccgccgcctgggcaagccactgccccccaacgtgggcttcttccacacggcaccccccactggccgccggagaaaaaccagcaagagcaagctgaaggcaggcaagctgctaaatcccctggtgcggcagctcaaggtcgtggcctccagcacaggctggacggcttaccacccaacgtctgagagagtgacctataagtctagtagcaaacctcgtgctcgattcctcagtggacccgtatctgtgtccatctg

SEQ ID NO: 141 - DNA, 443 bp, Homo sapiens
  misc_feature (199): n equals a,t,g, or c
tatagcgatatcctgttttacccttgatcaattaaatcagaatctctggggataaggcccaggtacagtgatttttaaaagtacttcaatgaccctaatatgcatctaagtgagttctatccttaaatgtggtttctctcaatttgtaggtaaatacaatattttgttgttgtttgaatgtaaatatcaggcttttgancctgttcctagtttaattttctgataatagtagtcccagacttttcaaatgcaattctttaagattgcaatgaagttagaactcttacgttactgtttatgtccacaaaatgtttagaaaagtttgaaaaggattttgaaaaagattaacagtgttaatatttcttatattgttgggtttatgcataatataatttggttaatatgtatcataaataaaagtattttaagatcaaaaaaaaaaa

SEQ ID NO: 142 - DNA, 423 bp, Homo sapiens
  misc_feature (404): n equals a,t,g, or c
gtaattatttaaatggagtcagtgtgagtataaatgtgacaactatttcttcacttaaaatgccaagggaaggaggatggtaagcagtgggaatttttccttctaaagagcttttttggttttgttttgtttcaattatttagattaaaaggttagaattatgtattactgtggacaaaattacaaatcactgtaatacaatacatgtgtgattggttaggttttacttatttktgttgaattttataatattcattagtcatttgcacttgtctgcatataaaccgtcatcttaaagtgggacatctaaattccaaaaactttatctcccatctgtggttctaagtttgcctcaccagacggtacttctacaaaatgtaggggcattctccctactgccaccnattaattggcacgggagcg

SEQ ID NO: 143 - DNA, 353 bp, Homo sapiens
  misc_feature (342): n equals a,t,g, or c
aattcggcagagcagtcacttagtatttaaagtcagtttagtgtttgtggcattcccgctgcttttatggcacttcagtcattttttagcacacttccatccatactacatgtgtccttttttccccttaacttctctaattgtgtttcttatccttttctttaaaaccattgcttcatctgggagtggtggttcatgcctgtaatcctggaactttaggaggccaaggcaggtagatcacctgaggtcaggrgttcaagaccagcctggccaccatggcgaaacctcgtctctacttaaaaatacaaaaaacttagctgggtgtggtagcaggcacctgtnattcccagtta

SEQ ID NO: 144 - DNA, 384 bp, Homo sapiens
  misc_feature (319): n equals a,t,g, or c
  misc_feature (372): n equals a,t,g, or c
ccaaaactagcctggagagtgcagatgtgcaacccaacgctgggctccccgtgaaaggcctggccttggccgtgttttctcccctgaatgcgggctggctctgcactgacccgtccactcctcctgggctcctggaactcctgacccaggacacttcctcccagccccagatgacacagcacacactgcgtcgcccacgagcccatgcgtgtcttctactgagctgattcccttctggtctgccatgtaattctggggctccgtccccaacccaagctcctcctcattcactgggttaatgcttttcatgcccaacgangctttgcacacaactggtactcaataaatgtgtggctgactgacagagtgganctatggccaggg

SEQ ID NO: 145 - DNA, 559 bp, Homo sapiens
  misc_feature (499): n equals a,t,g, or c
  misc_feature (540): n equals a,t,g, or c
cctctcctaccagcttaggccagaggacttagttactatttccaatagatgggagccaaggaaaagacaagcatctgtgatgtcatgtctccccccaaacgggtagctgcctcaccagcctccattagagacatcccccagagtaagaaataagaaataatcatgagtagaatgagaaaaaaatacagcttcctttatctgagaaaaacaatagtagctcaatgctgtggcctaaagggctttgaaaataatgcaatttctgataaaaataaatgccattattcttgcttattgtcactgttttagtcaaataagattttagcaagcatatttcaaattgttctaaatctaagtaaattggtaattaaatgctatcattagaaagtattttaatatcagaaaaattggaccataagaaagttagtttacccttgtattcatatatacatgtgcctttgtgctaaaaattgttatcatttagtgagaacctgtgactatnatagttaatttaatttaatcttcatatttctctgaccgttngagagtttgtgacttgggt

SEQ ID NO: 146 - DNA, 333 bp, Homo sapiens
  misc_feature (175): n equals a,t,g, or c
  misc_feature (246): n equals a,t,g, or c
ttagaggcttttcttaatgtattcacctggtgtgttcagttatttctgaagatatagaaatgtttgatgaaatgaatgaagatacagaatgtagattcagtatcaagctctatctcataacagtaacattcctactacatgcaaaccctatacatactattatttaatacctttnttcaccctactatcatcaatggctccattttatagatgaggaaattcaggattacagcagttaagtatttngtccagctaggtcgtacagccagtaagtattctgcccaggtcatacaaccatatccagatttgtggttaatcgcattactgtccagt

SEQ ID NO: 147 - DNA, 364 bp, Homo sapiens
  misc_feature (212): n equals a,t,g, or c
  misc_feature (223): n equals a,t,g, or c
  misc_feature (331): n equals a,t,g, or c
aattcggcacgagcccgggagggaggcaccgggccgcgggcaagcctaccgggggtcacaatttgggtctgcagcagaaatgctttcagaacagacagcagcgctgggggacaggatgggaatcaatgaatgtacagctggatggagcagagccccaggtggaaaggggaagccaggaagagcggccatggagaacagtaccaggacctctngagcacctgtnctgtgaccttgaagaggagccacagtcccttcaggagaaggctcagtctgctccctgggttcctgcaattccccaggagggggaacactggagacttgggagattggnagctgcacttctttgcggtggatcacaggattt

SEQ ID NO: 148 - DNA, 323 bp, Homo sapiens
  misc_feature (148): n equals a,t,g, or c
  misc_feature (234): n equals a,t,g, or c
  misc_feature (266): n equals a,t,g, or c
tgcacccgaaatgtccatcagcagtagaatgaatacctgtaatgtatttgtaaaatgggataccttgagcaatgagaaggaacacagcagagaccctgggtgaatatcacagacatattgttggaatgaaaaagtcaaacataagagnaatatatgaatatatggtttcatttattaaaaaatttaagggggagccaagtgaacatgtaatctcatgatgttaggaagccaggngaggaagtcacccttggtttgggatggggttnctggaagggcatctgggggctatggtccatgtttctgttttctttgatctggttact

SEQ ID NO: 149 - DNA, 350 bp, Homo sapiens
  misc_feature (294): n equals a,t,g, or c
  misc_feature (313): n equals a,t,g, or c
tatcatcaataaaaagaaaaaagaaaaaaatcttatactgtccaaaaaattagggagaccagcgcccagtgttcatgtgaggggggactagtgtccatttccaccaagcagcctggaaatgctcatcctcacagggcattggagaggtttctcaagaagcgagtgcctccatgggggaaataattaaccccagattaaatgctgcttcagaccttaatgggatgggtaaaaacaagatcccaaaagggtccaaactctttccaggggtaggatttaactgttattccccagganccaaagcttcaagggaccnttttttaggaattacggtattattatccccggccaca

SEQ ID NO: 150 - DNA, 837 bp, Homo sapiens
  misc_feature (775): n equals a,t,g, or c
  misc_feature (824): n equals a,t,g, or c
gtgatgacacagacctgcagatcttcgtgtgtttcgctatgggcaccccatcaacccacgtgttgccttgcgccacatggagcgctgctacgccaaggttggggtgtcagactgagggggcggaccatgtgggaacatcagtgggccagtgggggacagatttgttgtctgggtggtgtcttgggagggcatgcagcgcacatccacagttccctccatttgtgctcatccctccagtatgagagccagacgtcctttgggtccatgtaccccacacgcattgaaggggccacacgactcttctgtgatgtgtataatcctcagagcaaaacatactgtaagcggctccaggtgctgtgccccgagcactcacgggaccccaaagtaaggttttccctcagctcctcccattttgcccctcctccctgcctcgctgtcccacattcatcccttccttcctcacctcacttttccttcactttttcctctcagcttccctgctgcttcaccctccattcctccttttccatgcctcctcaccgttccctgaaccctccatwcttttccttctccctccttgagcccccattcctattctcccttatcaccgctattcatccccccaacctggcctccttgcaggtgccagctgacgaggtatgcgggtgcccccttgtacgtgatgtctttgagctcacgggtgacttctgccgcctgcccaagcgccagtgcaatcgccattactgctggggagaagctgcggcgtgcggaagtnggatttggagcgcgtgcgtgttttggtacaagttggacgagcttttttnagcaagagcgaat

SEQ ID NO: 151 - DNA, 246 bp, Homo sapiens
cccaagtggtgaattatctacaagtttgtagcaargctaatactcagactcctctacagccttgctactcagtgtagtctgtggtccggcagtgtcacaccactggggtacttagcagaaatgcagcttctcaggctccactccagctctcctcaatcacagtctgtttttttgtttgtttgtttgtttgttccgagatcgcgccgctgcactccagcctgggcaacaagagttgtctcaaaaaac

SEQ ID NO: 152 - DNA, 212 bp, Homo sapiens
tctcgccatgttggtcaggctggtctcgaactcctgggctcaagcaatcctcccatctcagcctcccatagtgctggaattacaggtgtgagccaccatacctgggcaagaccatcttgttttttttttgtttttttttttttttgagacagagtctccttctgtcacccaggctggcacaatgttggctcactgtaactcccaccttccct

SEQ ID NO: 153 - DNA, 190 bp, Homo sapiens
tgttttaaactctacttttttggtaccatcttttttcctctcctcttttctgatgctttgccaagttcctgtgtgctgtgtctgtttctttcaaatgtgggagtcctactgagttcttacagctcactggaagttcctatactttcctgacccgcaggcacggcaggggacatcagcattcctcgtgccg

SEQ ID NO: 154 - DNA, 490 bp, Homo sapiens
catacctctgtctaggctatggaagatcaattctgaggacaggctgtatacgcacatattgttttagtcagaaactaggatggagctaggtgctgtgactcacacgtagaatcacagcactttggaaggcccaagtgggaggatgacttgagttcaggagttgaagaccagcctggacaatatggtgaaaccatctttacaaagaatacaaaaaattaggcaggtatggtgctgcgtgcctatagtcccaactgctcaggagaattaggtgagaggatcggctgagacgatcctcccaccctggttcactcctctcaggctagactctctctccttttcattggcttgtcttagctattaataagaagtctcggccgggcgcggtggctcacacatgtaatcccagcactttgggaggccggggcgggtggatcacgaggtcaggagatcgagaccatcctggctaacacggtgaaaccccgtcgttact

SEQ ID NO: 155 - DNA, 533 bp, Homo sapiens
  misc_feature (71): n equals a,t,g, or c
tacttgccctcctttctttatcgcctgggacagactttacaaacagacctrgggaagtcccctaagggctngcatttatccccatctccctaggggtgatcagcattgtgacagctgggcagagcagtggtgaactgcacccatgtccctgctcacatctcctaagatctcagaattgcctgaggttctagcgtgggctccttctctccagatgatgccatccccacccccctcatttccacacagcatctgaggcatcctgcactaaaagatatatgtacagcaaaacaaaaatagaaaaccagcacagcagagtggaggtggggtataaatatacccagatccccgctgatttggttactcggggtgagcatcagatggaaatagaagtttccgggggccaagagagaaagagggatgtaacgacaattctttttcaaaacgtgttccctggtattgcctcgtgggaaaaatggtttcttggtcaaattgatttggggaaattgctgttcattttcaccgattctggggaa

SEQ ID NO: 156 - DNA, 415 bp, Homo sapiens
  misc_feature (354): n equals a,t,g, or c
  misc_feature (377): n equals a,t,g, or c
cctgttttccctagggtgacctggccggggtaacaaacacttgttctctaattccacggtcagccttgacttaattgaggtacttgatttccaacttcctgtcttgctgccacagataatcactgatgaaaccaaacaggcaacaccttttggtggtcctgtggagagcgctgccccgtctgggtcttaggaaggcaattgaatatgaatgttctcccgagtgcttgtggaaaagagatggtgttggccactttttagacgaagagaaatgagtactagtgaacactaatcatagtgactaaacagtaaacggctcccatttgttgtcggctaaagcactggattcttcatttntccatcccaggcctgttcctggntctggcctggccctgtggctcagggaagcttggccggt

SEQ ID NO: 157 - DNA, 488 bp, Homo sapiens
  misc_feature (434): n equals a,t,g, or c
  misc_feature (478): n equals a,t,g, or c
cttttatatatagttaattttttgccagttacaacgtccatagaaccccaagatttagaatgtatcatttatatttcctctaaaaggtagtaagatatttcttctgctgttttgtgaagccactcttctacagtatctgtagccttatagcaaattaattggttgtactaaaaattttagagactgcataggtctcccttttctatcctaattacctgcaatagcctagagacgctgagcatgattacattagcaacttgactgtttaaaaaatttgttatacttgataatgaccagactgtgtgctggagtcatttgtttccttcttttctgctccccgaatacactatttaatttggttacttttatttttaaactatatggcacccttttaaataaacattcattgctaattaaaatctgcccattaaatnggcctcagcatttaaataccatatattttataactccatactgnggctatccaa

SEQ ID NO: 158 - DNA, 577 bp, Homo sapiens
  misc_feature (493): n equals a,t,g, or c
  misc_feature (511): n equals a,t,g, or c
  misc_feature (519): n equals a,t,g, or c
  misc_feature (547): n equals a,t,g, or c
  misc_feature (564): n equals a,t,g, or c
aggcaatggcccaaatgcagggagaagagtcgcttgacttgaagagaagacggattcaccaatgtgactttgcaggatgcagcaaagtgtacaccaaaagctctcacctgaaagctcaccgcagaatccatacaggagagaagccttataaatgcacctgggatggctgctcctggaaatttgctcgctcagatgagctcactcgccatttccgcaagcacacaggcatcaagccttttcggtgcacagactgcaaccgcagcttttctcgttctgaccacctgtccctgcatcgccgtcgccatgacaccatgtgagccgcacaggtcacactagagaagctgcgctggtatctttcctggtcgtgtgctgaggttgggacaattttttcctctttgacttcagcttgcatatggggttgaagcagcccactgagccaagttgaggagactggaggaaaagagagctggtctcccstggggctytttcawanttctaccttcamtttttncactgttncagacccttttttttcaaccttcacatngggttgaatttccagtnttggcaaccatgg

SEQ ID NO: 159 - DNA, 533 bp, Homo sapiens
  misc_feature (511): n equals a,t,g, or c
attcggcacaggctttactggatatacagttaggtgggaagaggagataaaggatgacaaactctcaaacaatatttatacatttatttactccagggtcaaatccaatccttggaagtagcttctctagtttattttatttgtcccagagctctactcacacttaggacccacccaaaaattctcaaaaacgtaatatggattctgcctcatctgatgctatttctggcagtgggttgtcagccatactctgcttcattccactgggtgtccttgctagatggggagtgagatgtggagcagggaggagctttggattctgggagtggaggtggcaagggaaaagtctcctagtctcctgtgatgttcctgcctccagataggaatagcaaaaacaaacmatttttttttgtgtattatgcctccakgacatgttacatctatgaggggctctgtctcctttcttaggacttggaactgtgggtaggaaaaagcccccttcttcttcttnctatcctacttaggaattgggt

SEQ ID NO: 160 - DNA, 604 bp, Homo sapiens
agccagtgtgcaagtggaggctaatgctgatggggcacagagaatacaaaggctggcctgtcttccccaggagacaaagcagccacggaggcttatacctttgcatgcctcaagatcagagtccagagacaatggaaacacttgggaccctggccttgtcttgggctggacaagcttaagcaactctttttgctgtggccctgctcccccaaaactaatattttgtaccttgttgcagaatattccaacccgggaccggctagagggcatggcagccttcagggagaagcggactcccaaatttgttggcaaatgacccccattttaaccttcagcatgggagatgcatgccctgaagagcaggatccagaaggaagatttgtggccagattgccttcatcatttcacctctccagacttccatttcttcacaaggatgatgatggaaataaaatgactggcgtgatgcctggaaccaaggtgctgatcctaccacctactgctaccttccttagcttcaccctggctagaaataatcacgagggttgggtttgctttggaaaatgcctgtctctctacttgaatgataaagaattaaattaga

SEQ ID NO: 161 - DNA, 918 bp, Homo sapiens
  misc_feature (725): n equals a,t,g, or c
ggcacgaggttacttctcttttccatgacagagttacaactatttgtctgtcccccttccccattagagtatatggtccccaaaggaaagccccatgccattcactcaccacctaatcatccccaacaactagtgggcaaacatgaaacacttttgttgaataatgtgtttcctttagcccagggattacaaagtcaaaggcttacaagggggaaggactagcaggtgtgctcrgaggggacttytagccaactggaragtaactggtgagaagacaatgacatgtcttagggtgtctgctactcagatcctcctcagttaagtccccgtgcacaaaggtgggtcaggtcctactgttgcccagatccttcagatcattcaaaagttacccgaattctggattttcatgcaaatctcccaatttttaaaaatgttggcatcaaattcagaatgttttaaccagccacactgtgtgggccmgggaaaacagcccaaaggccaggtgaagctgcagttttcaactgctgccttggcctctcccagagccccttaagtcctaagaaggctcagtcaacacactggcactcgtttcatcccactggttgagaaagcaagtcttagcaaagtaatgggggagtcttaccaaaactgcaaaggaaaaaaatatgataccatgaaattagaaattcactgcatttgaaatgaaaatgacttatttctgtacntctataactcacaaatttagcagacatcatttagacatttttgtagtgcaacagatttaaatctggaatttcatggtttgtaaatcactatgtgatactagctataaccatgagcaatattacgggcagtaaatgttgatttctatttcgtttcttgaagttttgtgtggttcatttttaaagtgagattcaa

SEQ ID NO: 162 - DNA, 439 bp, Homo sapiens
  misc_feature (7): n equals a,t,g, or c
tccccanacatttcctatctgatctccaagctgcttggtgtgcggtaatttaatgactatttgcggtcttctgttgcatagcagagttgtatttcttgtaataactcacaagtattgaaactagggaatcgtacaaatcatcgtttggcccttgcgataagatttaaaggttaaaataacagtaaaatttctatttaatgaccacctccttttaaaaatcaatattggtttaacacctattatgtgcttagcacagaaatctatccctcaagataagcataacataaaggtttaagcaaatcagccgtagtgaaagacctaataaacttgatacgctatctctgatgaccattgaaaaagtttaaactttggtaataatctggtgttggatctgctatgccttgcgagattaattttgttctggaagatcctgttttcc

SEQ ID NO: 163 - DNA, 555 bp, Homo sapiens
  misc_feature (371): n equals a,t,g, or c
ggcagagggtcactcaacacttacaatactagatttgtggggcagttcccccacacctaacaattctgcagatgaatcttcagcaggcagcagctgggtgtccttyaattaaaatctgacactgctgwcctggakatagcgtcagattccacaggttgagagttgagtcctaagcctctccccaacttccatgacaatcacaagtcccagatgttttacctgtgcttctcaccaaccagttataaataagtgttcccatgaccccctccttgggtttgattaatttgctagagcagctcacagaacccagggaaaatacttttaccaktttattataaaggatattacaaaggggacagatgcgtagcagnatggaagaggtgcagagggcaaggtacatggggaaggggcatggagcttccctgctctctctgggcatgccactttctagggagcccccatgtgttcagctatccagaagctctttgaacccagttcttttgtaggatttccggaggctttcattatgtaggctaatttcattaaatcttggcc

SEQ ID NO: 164 - DNA, 372 bp, Homo sapiens
  misc_feature (83): n equals a,t,g, or c
acccacgagggcagagtgctgcttgctgctggccaggcccctgcgtgggcccaagctgggactctggccactccctggccagnctttggggaggcctggagtcatggccccacaggctttgaagcccggggccgccattgacagagggacaagcaatgggctggctgaggcctgggaccacttggccttctcctcggagagcctgcctgcctgcgtgcccgcccgccaccccagcctcccagctgctctccgtgtctccaatctcccttttgttttgatgcatttctgttttaatttattttccaggcaccactgtagtttagtgatccccagtgtcccccttccctatgggaataataaaagtctctctct

SEQ ID NO: 165 - DNA, 443 bp, Homo sapiens
  misc_feature (390): n equals a,t,g, or c
tttatttatttagaacacagactgcagagtagtatgatggatctccagctccagttgtcaccatcttgctgttcttgtttcacctatcactgcctctaatcttttttgagtattttaaatcccatttttcagttttccaggtgattctaatgtgcagccaaaggttgaattactgaaatggatcctcaaaatcttatgacataaatttgttcatacctactcttcattccacaagagggaacgaaaggttactcattaaaaaatcttaaacattttaatatttaaatctgtccagggaatctcatgtcctgtaagattacatattgtctttcttgggctgttgactggttccgggaaattagggtcagagtctttgccgggatcagagcncctgttcccatggccgtgccctgcacacccttccacattgtcagcctgtttcc

SEQ ID NO: 166 - DNA, 465 bp, Homo sapiens
attgtttaatcagaaaggaaaagatgttaatgagcaataaatcatctgaaggtcaactctcactggtaatagtaagtacacagaatgttacagaactgtaactgtggtgtataaaactgtcaagtaaaaagactaaaagatgacccagtcaataataataactaaaacaacttttcaagacatagacagtacaataagatacaaataaaaacaacagaaagttttaaaatggggagatgaatgtaaagtatacagttwttattagtwttcattwtgwttatwtgtttatgcaagcagtrtggtaatcagcttaaaataatgggttatgacagatagtatttgcaagcctcatggtaacctccaatcaaaaaacatacaagagatacacaaaaaaataaaaagcaagaaattaagtcataccaccagagaaaatcacctttcctaaaaggaggacaggaaggaagt

SEQ ID NO: 167 - DNA, 680 bp, Homo sapiens
  misc_feature (59): n equals a,t,g, or c
  misc_feature (60): n equals a,t,g, or c
  misc_feature (381): n equals a,t,g, or c
attgaattcaaaaacttttatttagacctggtcatctattctcttaattaaatgaaatnnagtttatggagattcacttataagtcatgtgttgcttaatgacagggaaacattctgagaaatgcattgttaggtgatttcctcattgtgcaaacatcacagagtatacgtacacaaatctagatggtagcacctattacacacctaggctatatgctatagcttattgctcctaggctataaacctctacagcatgtttctgtactgaattctgtaggcaactgtagcagaatggaaagtatttatgtatctaaacatagaaaaatatatagtaaaaatacagcattgtaatcatatatgtgggccattaggtgatgcanaactgtgatatctccatatataaaatttattagataggttatccccaaacatttaggtatctagtaaataaacttattttatattactatctaggggacttatttgaaaattactgcagaaatgatgacctggtaacatttggaagattttgttatggtgtcactgtcattttgacataccctatggaatgctttgtgacaagagaggtaattgccaatgtgttttttggtgggaatccttcatcgggttttccacattggttggtaacagtgatggtcatcactgtagccacgcctgt

SEQ ID NO: 168 - DNA, 394 bp, Homo sapiens
  misc_feature (288): n equals a,t,g, or c
  misc_feature (292): n equals a,t,g, or c
  misc_feature (392): n equals a,t,g, or c
tatgtttgttgcctaaccttggcaaatgtacttgccctctctatgactcagttttatcacccgtaagatgggaataatagcaataatatgcctaatagagtttttgtgagaattaaatgagattatatatagacattgggcttagcaaagggcctggcacttcgtaagtgctgaaaaaaaaattagtcattgtcaaggaatgttatcgcttacacccatctttttccatctggttactcttctcccagctccaacagagcaatggcccctgggaggctaagagatgangaantcaccatctacttctggggagggtaataaacacaacccaagtagctcacattaacggagactccgttccaacttttgcagcccggcagagtcccaggggntg

SEQ ID NO: 169 - DNA, 443 bp, Homo sapiens
  misc_feature (339): n equals a,t,g, or c
  misc_feature (369): n equals a,t,g, or c
  misc_feature (387): n equals a,t,g, or c
  misc_feature (417): n equals a,t,g, or c
cacgaggtgttccacacaatgttgaaggttatgtccaaatttgaaaaacaaatccaattaaactagctaccatacaaatatatcttttgttattgaaaggtgatttcagtcgtgatttttcawtaatctagttttgtaaaaatcagacttccygtaaaccaattgaaaacctctacattttactatatgtattcatggacttaatttcatcaaaaataccaatattctctgtgccctaacaagtgtaattgcactaaccttgtagttgatatttactgattgaaatgtatatacacaaaaattatgtaaaactgattatctagaggtttcttcattagntagcaccaaatagttattgtaaacctttgncctgtatttttttaaagnctgcaacatgggggaacccagtatggttgntgggtttaatacctgtgctgcaattt

SEQ ID NO: 170 - DNA, 417 bp, Homo sapiens
  misc_feature (383): n equals a,t,g, or c
  misc_feature (403): n equals a,t,g, or c
  misc_feature (410): n equals a,t,g, or c
gacctcaagtgatccacctgcctcagccttccaaagtgttgggattataggcgggatagccattgcacctggccctgttagtgtcttctatttgttgagctcttgatcgttcacaaagccccttcataactgttaccccagaaaaattccacccattttgcagatgagaaaactggagctttgagggcactttctcagggtcacaagctagtacgaggcaaagctgagtcttcaaaagccttttcccctggactccagaggctcccacccactggatggaaggcttttcccctggacagaggctgggggctttgagggtgttgacccggggatggaaccttctttcttctcttcttcccccgtttgttacttcattcagtttntggcccagttaaaaaatttntcctctnatggacc

SEQ ID NO: 171 - DNA, 505 bp, Homo sapiens
  misc_feature (487): n equals a,t,g, or c
gaaacgctatctctagaccaggaataattatttgctatataatacagcaaaaaatatgtatgtataaatggactcattcaaaatatataaagaactcctattacaaagaaattgacaaacagcccagtatatcaatgaatataaaaatttgagaagatattttccataagaagatatctaaatgaacattaggcatgagaaaaccaaattttaggatatcactacacacctgggtgtagtttaaaagactgaaaatattaagtgtgtgggaatgtagagcaactggaaatggcctacatctttcataggaaatgtaaaacaatacaaatactttgscaaaactctgtccaacattttctacccattcaccargcaactccatccctrgctatagatacccagggaaaataagtatgtatcttcacagaaataattgtgtgaggatgttcatagttacttgtgcacatagttatcaagtaaacctgtntcccatcagaaaatggtt

SEQ ID NO: 172 - DNA, 478 bp, Homo sapiens
  misc_feature (61): n equals a,t,g, or c
  misc_feature (354): n equals a,t,g, or c
  misc_feature (356): n equals a,t,g, or c
  misc_feature (419): n equals a,t,g, or c
gaattcggcacgagcagaaccttgaacttcagccttataacttccaagcccagtgttcttntattgggaccagactatctgggagataatgatggagaatgaatttgaatatgaatatgatactactttattacctgccttgcagcaactcatgctatcgaatttccaaggattcctagagccttgtggcctctttggataaactgctctaatgtatgtgaattttctaaacttacctatttgcatcacaaatgtaaggatatttgtagtgggctagggaaaaattctaatagtctccaatctaataaaaataacaatgtttaatataaaaataaagctgctaacgttcctttnanttccctcccttatctggcttaattccccccttttgcattgccaaggctaagccagccagaatncctaattgaaaaccagttaggcatgaaaaggaaaaaatcttcttaacctttacccacac

SEQ ID NO: 173 - DNA, 431 bp, Homo sapiens
  misc_feature (38): n equals a,t,g, or c
  misc_feature (71): n equals a,t,g, or c
caaacctccccagaaaacgtcctgcctggggaagggantccatccgtgaactgcccctcctaagcttttgnctggaatctggaatttgaaattcccactaatggaagcctcgcatggaagtcctgccctggcgcaggtgttgcagaaggatgtggggaaacgattgcaggttggccaagaactgatagactatttctcagacaaacagaagtctgctgaccttgagcatgaccagaccatgttagataaacttgtggatggacttgctacctcttgggtgaactctagcaattacaaggtggttctgctgggcatggacatctgtccgccctggtgacccggctgcaggatcggttcaaggcgcagatcggcacaggtgagctgcggcacttgtggagcggacccggccccttcagacccccagccgagcc

SEQ ID NO: 174 - DNA, 445 bp, Homo sapiens
  misc_feature (259): n equals a,t,g, or c
  misc_feature (424): n equals a,t,g, or c
actgtgatagagatggggtcttggggggctgcctccaccactgcctgccctgctcagcgctgacccacttcccttgaccagagttttggcctctctgaatgggacggtcgttttagtcctgagggcccataagaagcccagtggcggctgggtgcggtggcgcacacctgtaatcccagcactttgggaggccgaggtgggtggatcgtgaagtcaggagtttgagatcagcctggccaacatggtgaaacccggcctntactaaaaaatacaaaaattagccaggcctgatggtgggcamctgtaattccagatactcaggaggctggggcaggagaatyacttgarcccagaaggcggaggtttcagtgagctgagattatgccttggcgacagagttagactttgtcttaaaaaaaaaaanaaaaaaaaaacttgggggggg

SEQ ID NO: 175 - DNA, 330 bp, Homo sapiens
  misc_feature (217): n equals a,t,g, or c
ttcttcgtcatcaccttcctcatcttcctgtgctctagttgtgacagggaaaagaagccgcgacagcatagtggggaccatgagaacctgatgaacgtgccttcagacaaggagatgttcagccgttcagttactagcctggcaacagatgctcctgccagcagtgagcagaatggggcactcaccaatggggacattctttcagaggacagtactntgacctgcatgcagcattacgaggaagtccagacatcggcctcggatctgctggattcccaggacagcacagggaaaccaaaatgtcatcagagtcgggagctgccagaattc

SEQ ID NO: 176 - DNA, 480 bp, Homo sapiens
  misc_feature (99): n equals a,t,g, or c
  misc_feature (217): n equals a,t,g, or c
  misc_feature (433): n equals a,t,g, or c
  misc_feature (446): n equals a,t,g, or c
ccacacgcgaatcacgcactttattattgcgtatagtcagtgactgtcaggaacctgaaaagtatgtccttcaacacagctctgcgtgcccgcggcctnggggtgcaagcgagtctcctccgccctccgccgcctccccccgcgcgcgtccccctctcctccctgcagtgactccgcgggtcgcttcctccacccgcccggagcgcagaggagaaangcgagcggctgcagatttgccccggtggcaccgtagccacaagccaacccgtaattgcaaagcaaacaaggctgaaatactggattggtctcaatcgtgacaagatctacgcttttgccgccaatctgtttgtgcagctctatttaaaggcacttgattgaggaaatgttgaaaatagcggtgcggacgcgtgggtcgatcccgggaattcccggnaccggtcacctgncaggcgtgaccagttttgccctcatcagtgcagt

SEQ ID NO: 177 - DNA, 209 bp, Homo sapiens
  misc_feature (175): n equals a,t,g, or c
  misc_feature (186): n equals a,t,g, or c
gggcacggagccgtgttggccagcctggtcgcaaactcctgaccttaagtgatgcacccacttcggccttccagagtgctgtgattacaggcatgagcgaccatgtttggcctattatttatattttaccactcagaatataagacagagattggcagaatggattttaaaatgntccaactactnttgaacagacatttatccaaaga

SEQ ID NO: 178 - DNA, 223 bp, Homo sapiens
  misc_feature (104): n equals a,t,g, or c
acacttctccaccggagggtctgtagtctctgggtgaggccctttgacgctcctagaagtagctgacgggcagacaggtgaatacagtaggctcgaaaacagantcatacagccagcctctggtgttaggggcgtgtttttgtgtgtgtgcacacgcagtaattcccggatggcccggacatcttgaaagatttccaggtgccggggacatgagcttttaagg

SEQ ID NO: 179 - DNA, 537 bp, Homo sapiens
  misc_feature (10): n equals a,t,g, or c
  misc_feature (11): n equals a,t,g, or c
atcggctgannggagtcacctgggctaaactaattggctgattttaatctcctgggattggttaattgactgtaatgacctgatttgagttaattgactgattgaaatcaaaagtgctgacctaattggctgattgaaatcacctagaatgaggtaactgactgattggatttacctgatctgagctaattggctgatcagaattacctagaccaaattaattggctaattggaatacactgggctgagctaattggctgattgaaataatcagggctgagtaagtgggttgcttgtattcacctcccctgagaagaataagtagggaaatgatctctgacttacctttttttttataagacatactcataaatggacattacatagrtatatttatatattgtatgtgtttgtatgtgtttatctacatatattatatctgttaaccttcaagttaaagtgtgcaaaggaactgaaatttcttcaatatgcagctatctcaattacagcctggctttctcccaatcaagaggcact

SEQ ID NO: 180 - DNA, 462 bp, Homo sapiens
  misc_feature (428): n equals a,t,g, or c
  misc_feature (429): n equals a,t,g, or c
aaatcctttgttacagtttagactcatgtcatttggttggttttattttctagccctttaacataggaggaaaattgtcatttcatgtataacttgtaacacaggaattgaactgatactagtttccttgccttaaattaattatatgtcatcccaagggtctctgttaattctgctttgccaagcaataatgagatctgggtttggcattagaagtatttcataattttggttttttatttaggtttcctccacatctgtaaagtgattgattaaattagaggaggcgtgtagaataaatcccaatcccattgcaactggcagagctttataaatctttataaattcagttacaacaaaggagaggatcctacaccattagagccatgccatcaggtgtttgcaagtgacagctgtagtgtgttccnnaaataataccaagttataataatccaagtaatt

SEQ ID NO: 181 - DNA, 516 bp, Homo sapiens
  misc_feature (32): n equals a,t,g, or c
  misc_feature (48): n equals a,t,g, or c
  misc_feature (62): n equals a,t,g, or c
ctgccccccatctccctctaaccctacccaanggattccctcgggtgnggtccccaagcganaaaagttcctactgtcctcggcctyccctgckggtaattcgcctttccagattagccaataacactgagctgatctcctagggttaaagaagagaacattggaacycattttgtcccccatgtaccccacaggcttgaaacagaaaatgatgtaaacttttgtggcatacattcacccattttcccaccatatctttactatcctgtgttgatttttttttcaaattacaaagacaatacatgttctttgtgggaaatctgaaaaatactaccaaatagaaaataaaaatcacctgaattcaccacgaccacattgtttaaaaccacatttctgggttttaaatcagtcagtggctgggcccaaaggcacttttgggtaagataagtgaagaaatgcccacaaggccaaggtgtcacttaaaaaaacaaacaaaaaaaacaagccaaaaaaaaa

SEQ ID NO: 182 - DNA, 455 bp, Homo sapiens
  misc_feature (9): n equals a,t,g, or c
attaaatangattttttaaaaaataaaatatatggttcatggagtctcggagtgcaaacatttgacaattccaagtactgtttgtattttaccattccaccatttttacagtttttggattgttaatagtcaaatcaatatgtttccttgaagcatgtttcatgcttcaacgtgtttctccttcaagtctgtcaatacttaaagctgaacaacctgcctctgatcatgtaaaaaagaatgatttaacctggaaccggagccaaaaatagagctttaaaggcaatcagggatgtcctatatctttagaaatagcactgtgatggcttgatctccttttcaatacaaaacaaagccaagctgtttacaagggtcaaaagcaattatttaaaaatttatattaaaaaaccataatcttctcttgttacctgtggaccaagaaaaaaaaaaaaaaaaaa

SEQ ID NO: 183 - DNA, 436 bp, Homo sapiens
aaccaccaaagaagagtggtccaagactttaaagatgaagggttgggcatcagcaccgataaagcatatacaggcagcatctgaggaagcgtaacccccagggtttagagtgaaaacagccagtctgaagtatccattactcaagtcccaaggtgacctctctctcctcagatttccttcttggccctgtgccctgcactttcttcactgtgttcaagtgtcatagctatcaggccactatcatggatatcatgtatccttcctggtgctcacacacctgtcaccttgtaaaacacggacattagtgtgaacacaggacagcttcgctctttctcttcctgcctttcctctatcagagaagttgatccattaagtaattatgtttggtctattgtaattacagatggggaccacttcaggggcaaaggtctgactc

SEQ ID NO: 184 - DNA, 861 bp, Homo sapiens
  misc_feature (2): n equals a,t,g, or c
tngcctatggaaaggataggtcctgtgaactgttacacaktttaacacttctgarattagratattagagatcctgctaaatattacgtattgtttccttggcctctcttaatagtgccatttatatttttaatttaccagagttaggctcattaagatagtgtttgctttgaaatcaatgtttctgtggraactaawtttaacttttacagatattgattacgggcttgtgaaaaggcaagtaaaggaggaatgctgtgctatctgggcattaaaacaaaacaatacgattaaaagttaaagagaaagaaaaaggtaataacagatttgtgtggaaggagggcaaaaaaacttcacacgtggattatctgttggagaatgtgcattgcaaaaggatgcaaatagcaatccgccctctagctttgatggaaaggtgtttttcccatgaaccgtaggggatttttaccaagtgaacgtggtttgaaatggagggcatgttgttcaaccctgtggtttgggaagggctgggacttttcaagttaggtcttcccaggaggagttccttttgagaaagttggtccaaggcactttacggtgtttgccggttcccaagcgatgggccaggactgttggcttaaaggtgtttccaagtgcgattttgggccccttcccgcaattgtcccggggtttctttagagatgttggaagggtggtttggaaaaccctgggggttttccggggccccctaacctttatggggaccccccgtggaccgtggtgcggttcccgcaatgttttgtggggtcttgttccgagtccccccttaaaaaaaactttgtcgcgcacccggaagggtacggg

SEQ ID NO: 185 - DNA, 341 bp, Homo sapiens
  misc_feature (262): n equals a,t,g, or c
  misc_feature (274): n equals a,t,g, or c
  misc_feature (337): n equals a,t,g, or c
accaatggctgtacacagagtaaaagtcacatttaaggatgagccaggagagggcagtggtgtagcacgaatttttatacagccattgcacaagcatttttatcaaatgaaaaattgccaaatctagagtgtatccaaaatgccaacaaaggcacccacacaagtttaatgcagagattaaggaaccgaggagagagagaccgggaaagggagagagaaagggaaatgaggaggagtagtggtttgcgagcaggttctcggngggaccgggatnaggtaaaattttgtatctttgaattcaataccaccttttttggattgaatttaggagataggnctgt

SEQ ID NO: 186 - DNA, 513 bp, Homo sapiens
  misc_feature (41): n equals a,t,g, or c
  misc_feature (479): n equals a,t,g, or c
  misc_feature (498): n equals a,t,g, or c
  misc_feature (500): n equals a,t,g, or c
gtgaaactgggactctttgttagtattaaatgcttcaaagnattgaatcatggttgtaaagtagcctagtgcctccctcaaggtacaaggctcttccttttgcctatctttctgcagcaacggggagtgagagggcagacttctctttctctgtcttgtacaaagaattcccatgccttggttcaaatgagaatgtagacactttcacaagggacccagaggtggtgatagctgtaactacttgggataagactctgacttctagccacctggctcagtgtagcttccagtgtttttactgatggctttgctggggattgtatgttagagggagccaatcctcccaccctctcctaagccccaacaggatccctgaatatttcattttagtattaaaaaactgaagaacaattaagactgtcttttaaaattatattttcctttccaaaaagtaaatactatttgtaaggatgagatanttgaggttcacaaaataancngtccctggggttg

SEQ ID NO: 187 - DNA, 305 bp, Homo sapiens
  misc_feature (70): n equals a,t,g, or c
  misc_feature (77): n equals a,t,g, or c
  misc_feature (82): n equals a,t,g, or c
aacacaatctgctcagcttctgaaaaaatctctggctattgagtggagaacaggctacagggagaagagnttgggancaggnttattaagggaccctattgcaatatccagacaagagataatcgcagtagaggaaggggcaaggcactgtcaggataagcctggaggatttsctcatggattaratggtgggtacaagagaaacaggaatcgaggaggattccccagttttcggcctcggaactkaagaaccgagtttgcatttactaggagggaagtctccccaggggagcacatttcacacc

SEQ ID NO: 188 - DNA, 471 bp, Homo sapiens
tttttttttggtggagggtggagggtggacttggggaggaagaaaggtaaggaagaggctagggagatgagggcaagaatgacttgatcagatttacatgagaaagaattacttcaggtgccatgtggagaaaagattggagggagaactaaagtggatgtgggtaaatgagtttcgaaagttattaaagtgattcaaatgagctgttgcaaaaactttgcatattatggtggtggcagatgtggagaaaagtggttagatttgagggatatttatgaggcaaaattgacagtagttgatgatggactagataggggagagaattgaggtataaagggtgagtccyagrtttctgactatgcgtctgaaaggatggtgatagtgttcacttaaatagagaaaaagcaaaaaggaccacatttattgaggggaaatagcgagttgatttgggacatattaagtgttgagttg

SEQ ID NO: 189 - DNA, 411 bp, Homo sapiens
  misc_feature (156): n equals a,t,g, or c
atttcagctcctgatggcatctgaccgccgtggacacttcccagtggtctggcttttggagggagagtagagcgggggatgatctgtgccagttggtcactccttggatattggagttatttccactggtcttgctgctcctctgttttgattttnattaactcatttcmccycagkgaattctggagcctggctgtttttgtgcctcctctttgccagtggatcatcagaacaaccccttttgtagcagtttcccaggttttttcagaagtggtgratccatgccttggcattcctggattattccatgtcatgtcagatcattcatcaaataaatattgacacatgtcatgtgatgcattctatgctgagcaccatcaggaatacaaaaaggtaaccgacacgttgttt

SEQ ID NO: 190 - DNA, 193 bp, Homo sapiens
aattcggcacgaggtcaagcgctcaccaaaaggcagaagctgtgccattttgatatgttatttaaattttatgcgttcttttaaaatttcagtttcaacaatttgctggaatatacgctgaataaacttcgctccccgttttttccggtgacgccgctgttggctggagcttcacggaaaacccggagaagcg

SEQ ID NO: 191 - DNA, 447 bp, Homo sapiens
  misc_feature (37): n equals a,t,g, or c
  misc_feature (430): n equals a,t,g, or c
ttggggatattatgactagcattctacgaatattttnctggaagacttttgtcttgttgtagaagatgttttttttctcttattttgagtaaaaagtgagaggaattgcaggaacacatataagcacatgcttattttttttaaagaaactgttcaactattttccttagttgagaattttatactcccaaaagcagtgatgtaccagagccccacttgtttcacatcttcagcatcacttgcaactaatcaatcttcaattttagctgttcttctggctttgtaatgacatctcattgtgcttttgctttgtttctatctgatggatatagatgtgaaacatcttttcttatggcttactggtcattggtattttttctattttgaaatgtttaagtccttttgccaatttttattgggtttatccccncattgacttgtaaggaa

SEQ ID NO: 192 - DNA, 305 bp, Homo sapiens
  misc_feature (292): n equals a,t,g, or c
attcggcacagagctaaaacatccctgtttccttttgcaaaacagtgcctggcatgtgggatccaggcgttctttaggatccttggataccacatcgtgaaatcttttatttttttactctgagaccagcaccagatgtaagtaagcatctcatatatttcagccaaataaatgggccaagggaaaaaaatatatatatatagacaggactagagaaaacctatttttgtaatgatgtttctttggatactgtctagtcacccagaaaaatgtatggatgaatttttttttnttttttttttggg

SEQ ID NO: 193 - DNA, 627 bp, Homo sapiens
gggaactgagccaacttggtacttggcagcagcccttctcaaggctgatgggaggttctgtaatcctctttgcaagctttgtcaccaggtcacacttttggcagccaatcaatagatttatctcattaaactggcagaagagtgtttcaatgcatgctccaacagctacctggaaatagcaattgtgagagatgctaaggtaaggatattccagttcctataaccgtctgatttttttgtccttggtgaattttcaatctgctgttttactgggatagctaagttccaggtttattttctcaggtaggctcacccacgacctctgtcctgtggtttgcattcctgaacatctgttagtctttcaaatgcaaggcacaaaactaacctcaagagtgtggctagatctgggagtgaacacagggcctgtccctcacagacgagaggtcaggagcacctttgtttcccaaggcaggttcttgattgatttaccttcatgcgttgatgtctttgctatgtgtgtaaaatgcatgtgttgctgaatcacatgtgaagctctacatgctggggtttatactgtgtttggcatgttgtgggagctcaataaatactaaatcagttgcacagtca

SEQ ID NO: 194 - DNA, 712 bp, Homo sapiens
tttttttttttttttttgaggttgttaaacaaattctattcagtagctggaaaagtgaatttcctgtggaatgacaggaattacatagaagcaagcaattttattttcctcaaatgtagcaataattttaatctgtacatacataaaacaaacagtgcaattataaaaccttgaaggtgacatgcatattttaaggtgcagttgggatgggggaggatgttagcatctccaattttccttactttttttttctagttccttatgcaaaagcactgagtcaggaaacttcatctggaatgctgaagttaaaggtgaacttcctgaagtctgcgcgtctaaatatcacaaacaaaatggaaatgaccttctagagcagtttggtagggactagagtaatatggctggctttcaagctggaaatgaatgaaatcagggatgcattttctgaaaaactaaaggagataatgtttgtaactgagtgtcccwatttctgtttcatagttgctaaccacatgagcccttccaccaatctttttattcggcatagkttctgaatagatgctgttcaatggrgttatttgtactaggggccataagaacagtggaagaggagcatggactcagacttcaaggaagaagccatttccccaggtccttccttctgcatctcaccacccctagttacaaataactccattgaatagatgctgtt

SEQ ID NO: 195 - DNA, 620 bp, Homo sapiens
  misc_feature (51): n equals a,t,g, or c
  misc_feature (602): n equals a,t,g, or c
aattcggcacgagtaaagattgagctcactggctcaactcttgatgtgtgnttatagttgagtttacaaaaaatgtttattaatcatatatgaccattgggggctaacagtataaacttattcttgttaaacttgtttgggttaaatagtaagtgaattgtaaacaatttagaagttttttgttcagcacacaagaacacttctgttacagattctctctgacagaaattgttattttggggtttatagattatagagggaaaagttagatcacttggaaaaacctaactctcatgttcagtaacttgagtatagaatttataccacaatttatcttcaataaggaacctacatgaacttaatcagttatctgtagtttttgcaaggcattagaaaaaatttcacaattacagaggactgaaaatgtgatttcaaccggctagtctagttgttgaatgtccagtcacattacacatagtcctttgtgaacttatttgtgaagggagttcactttttatggacatacgtgtatatttccttgtgtaatataaagcagatggttattagtatttttagttctttcaagtttaaaattattccanttgctagacatcacagga

SEQ ID NO: 196 - DNA, 535 bp, Homo sapiens
  misc_feature (73): n equals a,t,g, or c
  misc_feature (194): n equals a,t,g, or c
  misc_feature (488): n equals a,t,g, or c
  misc_feature (516): n equals a,t,g, or c
ccgctccctgccctgcagctttgggctagggacctgccgcttgcgccggttcctacgagcggcgccaagcccncactctcccagtgtgggcagtggcaccagtctctgcagtacatgcgaacggctggtacgaggccctggcgcgtcttcgccggtgcgggttgcggaggaagtactgctcggcgtgcacggcncacgggcctgccctggtggggcagcattctgctctccaccgtggccttacggggtgctgtcacgctgcctttgsacgtaaccacgcactacatcctggccaaggtggaaaatttgcagccagaaataaaaactattgccaggcatcttaaccaagaagttgcagttcgtgcaaatcasttggggtggtccaaaagagatgccaggctcacttatctaaagaatatgaggaggctaatttcagagctatatgtgcgagataactgccaccctttcaaagccactgtgcccagctnagatgtttcttattattttggaggtggngaggattttagacctcttt

SEQ ID NO: 197 - DNA, 389 bp, Homo sapiens
  misc_feature (14): n equals a,t,g, or c
  misc_feature (366): n equals a,t,g, or c
ctgaatgcccaggntgtaggtgtataggtgccatccacctggtaaagagagagctgtagcgcaggaatgaggttgcacatgtagaagaagggaaggatacaggggagagaagtgtcttctagtcctaaaaaacagcctgtgggctggcatggtggaacaaacctgtaagtcccagcacttcgggaggtcaaggtaagaggatcatctgcttgagcctaggagttcaagwacagcctaggcaacatagtaagatcccatccctacagaaaaattaagaaattagccggatgtcgtggcacacacctgtttgtctcagytacttgggaggccgtctytkggagcccgggaggttcaagtctgcagttnacggcattgatccttcgccactg

SEQ ID NO: 198 - DNA, 490 bp, Homo sapiens
  misc_feature (15): n equals a,t,g, or c
  misc_feature (82): n equals a,t,g, or c
  misc_feature (417): n equals a,t,g, or c
  misc_feature (446): n equals a,t,g, or c
  misc_feature (465): n equals a,t,g, or c
gagaaatgttatgtnctccagaatgaaactgctgttttgtcagcagtgttctgaagcctaacagatagtagtttttaaagantttccaatttaataaacaaaaaagacattcttggattattttatttggttgatttagtagtgtatttcttttgtatttatttgtcacttttttatataaagaaatctgtaaatctttgtgtctttttgagttatttgaaagggtttttttgcattttaaaagcataattaaaatgcaaattgttttccctagctttttatttatttatgttttaatttttatgggtttttgaatgataggaagttttaaatttctttaggtcagatcccatcagtctttgtaaaatacccgttttaaagccgggggcttttcatggggaataggaaggactctcnggaaaaccttgggctgcttgcgagggccngcaccagggggtacctgcngtggacctattccaggatagggggt

SEQ ID NO: 199 - DNA, 324 bp, Homo sapiens
  misc_feature (270): n equals a,t,g, or c
  misc_feature (319): n equals a,t,g, or c
ggcacgagcggggtccagctccacttctacccagtctccttgctcccatgcccccatctgaaagctggggtgacgcagcaacagccctgtttcatgggtgccatgagcagctcacaggcctkcccagagccagtcctcagcacacagaagtcactaccctgaagggactcatagggtcattctcaaggagcagttttccttttaggaggaatggccgggacctgcccatggcctcctttcagcccctaaaccggcctgcaccctgaggantggatgggcagtccctgccgcatggcccaagttgatttggggtcaggantggtt

SEQ ID NO: 200 - DNA, 753 bp, Homo sapiens
  misc_feature (77): n equals a,t,g, or c
  misc_feature (374): n equals a,t,g, or c
  misc_feature (702): n equals a,t,g, or c
  misc_feature (721): n equals a,t,g, or c
  misc_feature (722): n equals a,t,g, or c
  misc_feature (727): n equals a,t,g, or c
  misc_feature (737): n equals a,t,g, or c
caaatttacggaacttggatctgtcctataatcagctgcattctctgggatctgaacagtttcggggcttgcggaantgctgagtttacatttacggtctaactccctgagaaccatccctgtgcgaatattccaagactgccgcaacctggaacttttggacctgggatataaccggatccgaagtttagccaggaatgtctttgctggcatgatcagactcaaagaacttcacctggagcacaatcaattttccaagctcaacctggccctttttccaaggttggtcagccttcagaacctttacttgcagtggaataaaatcagtgtcataggacagaccatgtcctggacctggagctccttacaaaggnttgatttatcaggcaatgagatcgaagstttcagtggacccagtgttttccagtgtgtcccgaatctgcagcgcctcaacctggattccaacaagctcacatttattggtcaagagattttgggattcttggatatccctcaatgacatcagtcttgctgggaatatatgggaatgcagcaggaaatatttggtcccttgtaaactggctgaaaagttttaaagggtcttaagggaggaatacaaattatcttgtgccaagtcccaaaggaggttgcaaggagtaaatgtgatcggatgcaggggaaggaactacagcatcttgtggnaaaagtactacagagggtnnggggnctttggccangggtctccccaagccg

SEQ ID NO: 201 - DNA, 289 bp, Homo sapiens
caggggcaggcaacagagtggcggccgctacggccwtggaacggggcatggagaagctgcggcrwgtcctgagcggccaggacgacgaggagcagggcctgactgcgcaggattcacagattaatctcttgaggtcctggatgcctcakcccttagtttcaacaccagattgaaatggtttgccatctgcttcgtatgtggcgttttctttkctattcttggaactggattgctgtggcttccgggcggcataaagctttttgcagtgttttataccctcggcaatctt

SEQ ID NO: 202 - DNA, 362 bp, Homo sapiens
  misc_feature (318): n equals a,t,g, or c
  misc_feature (325): n equals a,t,g, or c
taaaatatgcagaaacgatttctaaggaaatttgagcacaaatgtttgctcattagaacactggaagggtcagtaatcagaactgtgtgcatatacaaatcacaggtctgggaagatcccataggtcgaaaatgtgtccttggcaaatggctcctctaataggctatctacgggggtgtggagcattaagagcaggtttactggagagacaaagataacaatagggtttgggaaaggcagaccctttaaaaaaggctgattttttgataagcaggggaaaaagttatttaattttagtaatwgtaggtgaccctattntaaaggntcctttattaccgggttaatgggagggctgttttttt

SEQ ID NO: 203 - DNA, 451 bp, Homo sapiens
gattcggcacgagcccaaatagaaagtcaaagggcttaaataaaatatgtctaggctgatttcctgccctgacatagattttattaatctgttttttcttctttatctttcaacgtttctctcatatactttgcatattttcctcctgaagttttcggctttaacttcaaacttagctttttgagaaacaccgccatgtacaatattgatctttgtcttattagtcccttttatcaaagaaagaatgtaatttttgactaggtgttaatctgcagattaaaaaggattcaaatttcttagagaaaaggtccagaatattcattactggaagaaagaaagaacaccaaacttacagacttccaaaagttacttaaaaaaatatctgcctacacttcagaactccaaagttgtctcgctggtttgtattaaaacacttaataaaaatcactac

SEQ ID NO: 204 - DNA, 508 bp, Homo sapiens
tcgagtttttttttttttttttttagatggaatctcgctctgtcagccaggatggagtgcagtggcacaatttcggctcactgcaacctccgcctcgcaggttcaagcaattctcctgccccagcctcccgagtagctgggataacaggcgtgtgtcaccacacccagctaatttttgtatttttagtagagaaggagtttcaccatgttggccaggctggtctcggactcctgacctcaactgatctgcccgcctcgacctcccaaaatgctgggattataggcgtgagcaccgtgcctggcccacaactgtatcttaaactccgtgtatcacataggaaatgaaatcaacctcatccttaatgtcagcttcctcttgtctttctctggggctcatcagagargccttcaagcactctcagattagcttggtgctaaattgaaaagttgagggwtggctctttaagctttgggttcctgaaatgcaaaacagggataattgtgtcta

SEQ ID NO: 205 - protein, 59 aa, Homo sapiens
LLIFFYQASSFTYVSRMKDTSKKNNIFAQFRKNDRDKQKLIETVVKQLRSLVNGMSQHM

SEQ ID NO: 206 - protein, 101 aa, Homo sapiens
  misc_feature (83): Xaa equals any of the naturally occurring L-amino acids
  misc_feature (96): Xaa equals any of the naturally occurring L-amino acids
LSNQTVHFAHVLCLIHLVTESSVSLPAFCPADGDQPPGQHSRLSLERQSQSQDELFFLSLKGAFPGDSPGAADMLFQGFPDCXSTHTQGELMFLSXPIGLF

SEQ ID NO: 207 - protein, 40 aa, Homo sapiens
  misc_feature (18): Xaa equals any of the naturally occurring L-amino acids
  misc_feature (37): Xaa equals any of the naturally occurring L-amino acids
NFVRVEQVELSSIETKQXLGLLALVLLFTVCEAGGGXQLL

SEQ ID NO: 208 - protein, 48 aa, Homo sapiens
NLNNYFLTLIRRNGSSHSLGKALMFFSHHCSSIIQTYRATKKESDTHN

SEQ ID NO: 209 - protein, 89 aa, Homo sapiens
  misc_feature (52): Xaa equals any of the naturally occurring L-amino acids
  misc_feature (87): Xaa equals any of the naturally occurring L-amino acids
  misc_feature (88): Xaa equals any of the naturally occurring L-amino acids
GMRGGSLLLFEEAVSFLRPGHSLTRGVIICLHRACSISQTQSARATPCSSQXATEHLGKCFQIFSEHWGITLLRWVPQLGERSYAFXXF

SEQ ID NO: 210 - protein, 44 aa, Homo sapiens
EDHLIPGVDWPAQHSETPSLNHKRRIIVVLFFLLNFFLIIVIFH

SEQ ID NO: 211 - protein, 40 aa, Homo sapiens
LSHGMGLQKKRTTTLLVSPYIYGHKPKVGFTLSNNLSLSP

SEQ ID NO: 212 - protein, 44 aa, Homo sapiens
  misc_feature (24): Xaa equals any of the naturally occurring L-amino acids
TIRYASSYVRDFLMCQLKSWSVYXNVSFCWGINSIAFSQNNINH

SEQ ID NO: 213 - protein, 84 aa, Homo sapiens
  misc_feature (73): Xaa equals any of the naturally occurring L-amino acids
  misc_feature (74): Xaa equals any of the naturally occurring L-amino acids
VVCDVTHSDEKHRSLQKCSWRGPSYQRNDKNLPAQSLSVHNFLNLHSNVPYFLPLESILHTTARLCLSLLKTXXWLPFLFQIRV

SEQ ID NO: 214 - protein, 56 aa, Homo sapiens
LVSAIWALRHFCRFNTFSGLLNNNRGKPKDPGAPLLRRNLLIHLLFKPAVLFCPGQ

SEQ ID NO: 215 - protein, 56 aa, Homo sapiens
IRHEARRRGAAPGRQVFRGAGLADRGEGHAHWPGISLKMPLITPSTVHLFDFSSMA

SEQ ID NO: 216 - protein, 45 aa, Homo sapiens
KKQRKGCPQYLEHLAHTLSVVVRGCLLLEILLKSQPITCRLSLIS

SEQ ID NO: 217 - protein, 52 aa, Homo sapiens
  misc_feature (37): Xaa equals any of the naturally occurring L-amino acids
KLDPTQACWLPEVTQQLSRNGCWKCFIVKGHMNTIQXQMGPGAFGRAFQFLS

SEQ ID NO: 218 - protein, 60 aa, Homo sapiens
PGGGGCCAPTQVTDSGAGTSPESQSPGSHNSTGTTETHKSGHKIIIDRRFVHFGCLCELI

SEQ ID NO: 219 - protein, 63 aa, Homo sapiens
  misc_feature (24): Xaa equals any of the naturally occurring L-amino acids
  misc_feature (58): Xaa equals any of the naturally occurring L-amino acids
GYKNSKNSYKLPRFYHLPPCFTEXKAKTQGDKVIGPRSTARFSFNIESVYPVPPFIPXMSLPR

SEQ ID NO: 220 - protein, 51 aa, Homo sapiens
  misc_feature (35): Xaa equals any of the naturally occurring L-amino acids
  misc_feature (44): Xaa equals any of the naturally occurring L-amino acids
PLKLSQAELFWMTSWGILNGAISFRPQKDPLESGXYDVAQMTPXRLACPSS

SEQ ID NO: 221 - protein, 55 aa, Homo sapiens
  misc_feature (28): Xaa equals any of the naturally occurring L-amino acids
  misc_feature (36): Xaa equals any of the naturally occurring L-amino acids
SPFVKPDFEMEGRLFSRSKGIEGNKKEXETYRRGGXSFQQEARGPSLFLRLGGTG

SEQ ID NO: 222 - protein, 61 aa, Homo sapiens
FGRALTMFILLSTILIERREGSNMGVTGSPWPYAGSTEYSPWAEVGLHLICFCTTEMMHRA

SEQ ID NO: 223 - protein, 39 aa, Homo sapiens
  misc_feature (27): Xaa equals any of the naturally occurring L-amino acids
  misc_feature (29): Xaa equals any of the naturally occurring L-amino acids
  misc_feature (32): Xaa equals any of the naturally occurring L-amino acids
AWEFSGRISWGTLNVLTTARPHQGMPXPXFAXPVNFIPR

SEQ ID NO: 224 - protein, 87 aa, Homo sapiens
  misc_feature (34): Xaa equals any of the naturally occurring L-amino acids
  misc_feature (45): Xaa equals any of the naturally occurring L-amino acids
  misc_feature (70): Xaa equals any of the naturally occurring L-amino acids
  misc_feature (72): Xaa equals any of the naturally occurring L-amino acids
  misc_feature (74): Xaa equals any of the naturally occurring L-amino acids
  misc_feature (75): Xaa equals any of the naturally occurring L-amino acids
  misc_feature (77): Xaa equals any of the naturally occurring L-amino acids
  misc_feature (78): Xaa equals any of the naturally occurring L-amino acids
LWPHSGLSHSSYMDFDANSAPFLFLKISSPFEGXNPRGSPVKCVXPLCLACAGKHIGKRNRGGRHLEVRXAXGXXRXXVCMPGMMSF

SEQ ID NO: 225 - protein, 74 aa, Homo sapiens
  misc_feature (45): Xaa equals any of the naturally occurring L-amino acids
  misc_feature (72): Xaa equals any of the naturally occurring L-amino acids
RRGKEGRRRRCGREAAVAMEGAARPPVPGSVLSASRGPALMLTPXLLSECQARLADKEDSCCGLDPHLHPDXTS

SEQ ID NO: 226 - protein, 22 aa, Homo sapiens
IHEIITCTLKICTFINVATTKK

SEQ ID NO: 227 - protein, 100 aa, Homo sapiens
  misc_feature (21): Xaa equals any of the naturally occurring L-amino acids
LTLDHCPSPGLHILTGLFHFXSCQSSCPFHTAAAALDMVSVRVFFLNAEENMKLKIEFVQIVNPGQRGGSCLIIPGMAFWEAEVGGLPDVRSSRPARPTW

SEQ ID NO: 228 - protein, 109 aa, Homo sapiens
  misc_feature (56): Xaa equals any of the naturally occurring L-amino acids
  misc_feature (71): Xaa equals any of the naturally occurring L-amino acids
  misc_feature (75): Xaa equals any of the naturally occurring L-amino acids
  misc_feature (91): Xaa equals any of the naturally occurring L-amino acids
  misc_feature (93): Xaa equals any of the naturally occurring L-amino acids
WLLLSFCFFRERVSLCHPGWYAVAPLYFTVASNSRNSSNLPSSWATGMCHHTWLTXYFLWRCSFIRFSGWXHSLXQGIPPTFASQSVGVQXVXTRALPIFLCQPSGLDA

SEQ ID NO: 229 - protein, 81 aa, Homo sapiens
  misc_feature (37): Xaa equals any of the naturally occurring L-amino acids
  misc_feature (66): Xaa equals any of the naturally occurring L-amino acids
  misc_feature (76): Xaa equals any of the naturally occurring L-amino acids
  misc_feature (77): Xaa equals any of the naturally occurring L-amino acids
NGRCLPPTLRPGRAFSGLFFPRVEGNLVPFSRKARFXGLKLGRQPTSFMLRKTLFWGSSSCTLGRXLQRGFCPNLXXTSLG

SEQ ID NO: 230 - protein, 86 aa, Homo sapiens
  misc_feature (57): Xaa equals any of the naturally occurring L-amino acids
  misc_feature (71): Xaa equals any of the naturally occurring L-amino acids
  misc_feature (75): Xaa equals any of the naturally occurring L-amino acids
  misc_feature (80): Xaa equals any of the naturally occurring L-amino acids
HVRAQGSAEAGLTVGWVSTVCSLVSELWCFPLFSYLSDHSEHKDGHVRKPGVLTTTXLPTGGGRTTEAVSXFLRXTSRHXGLGKNV

SEQ ID NO: 231 - protein, 54 aa, Homo sapiens
  misc_feature (9): Xaa equals any of the naturally occurring L-amino acids
  misc_feature (11): Xaa equals any of the naturally occurring L-amino acids
CTKENNNTXPXTYSLYCCGRSSYMLHSKRPSLHFFQAELLLYIHSELGGEDWTV

SEQ ID NO: 232 - protein, 46 aa, Homo sapiens
YKTFFKGKELKCTAFSVLSNCLSIILNSIFFSRKSKFYKICIPKFA

SEQ ID NO: 233 - protein, 38 aa, Homo sapiens
STFSWLTLISFLGLCIYNTFVRIWPIRGKTIANFASPP

SEQ ID NO: 234 - protein, 42 aa, Homo sapiens
  misc_feature (42): Xaa equals any of the naturally occurring L-amino acids
KSCLFLGSPAETFCLWLTLYSLMCLKGGGTLVFVNIRLFKTX

SEQ ID NO: 235 - protein, 156 aa, Homo sapiens
  misc_feature (82): Xaa equals any of the naturally occurring L-amino acids
  misc_feature (118): Xaa equals any of the naturally occurring L-amino acids
  misc_feature (124): Xaa equals any of the naturally occurring L-amino acids
TLASCSWNLRSAGWTKCVVHNTAADECLAAHLSPRGPAEPPGCIPWPATERTPPHPHFPGEEPGLWELAEGPASEDRGYQGXGGCRCFVGGLCAALRPARSWDLLKQWSSAGLGGAAXPSWGAXPPLCALTLTRGLEVPVARGPSIPGSQMMEAQC

SEQ ID NO: 236 - protein, 64 aa, Homo sapiens
LRAQLWFNLTDSNLCHLLLFFLCVFLRQGLTLITQAGVQWHDHGSLRPQTPGLKRSSHLSLPSN

SEQ ID NO: 237 - protein, 66 aa, Homo sapiens
  misc_feature (50): Xaa equals any of the naturally occurring L-amino acids
  misc_feature (55): Xaa equals any of the naturally occurring L-amino acids
WAEIVPLRSSVGDRVRLHLKKKKKKSMLVDYNFTLEEFWTKLLISQTKLXLIKRXGTTGKLCNSII

SEQ ID NO: 238 - protein, 99 aa, Homo sapiens
  misc_feature (13): Xaa equals any of the naturally occurring L-amino acids
  misc_feature (70): Xaa equals any of the naturally occurring L-amino acids
TEQQRYCSLWSRXTQRQCAQKSNAGAGLHSYGHLLLIICKLRGGLCRDFQDEGSNFQVIRSLPRKGMVTXRFCHGNGKLTWHTGRHVMESCFCPPTCFS

SEQ ID NO: 239 - protein, 104 aa, Homo sapiens
  misc_feature (11): Xaa equals any of the naturally occurring L-amino acids
  misc_feature (59): Xaa equals any of the naturally occurring L-amino acids
  misc_feature (78): Xaa equals any of the naturally occurring L-amino acids
LLQPRPPMLKXFSHPGLPSGWDYRHVPPSLIFVFFVETGFHHVSQAGLELLSSSNPPTXASQSAGMSHRDWPHLMGFXRWEQRMKGGRELPSFPLPYLLKTGKN

SEQ ID NO: 240 - protein, 73 aa, Homo sapiens
  misc_feature (63): Xaa equals any of the naturally occurring L-amino acids
FGTAASYEAPTRTGVWGPPSSASGRHKGFFGVAPGLTALIIPGFHLDALAGEGSRMPCGSTPXRSPQPSLPVG

SEQ ID NO: 241 - protein, 68 aa, Homo sapiens
  misc_feature (5): Xaa equals any of the naturally occurring L-amino acids
  misc_feature (59): Xaa equals any of the naturally occurring L-amino acids
EQRFXVSLKGCKHKNKEGYNMQGLKCLLSGLLHRQFASPLPLQYGKKGIEQSNHVGFSXVSSMQASSD

SEQ ID NO: 242 - protein, 79 aa, Homo sapiens
IRHEPTAARWAISFKSGCGQVRYCDWPAPQIICGDTPLRDFLKLNVAMWKHLSLLISLFISILKPFLSSNLFYQHLNFK

SEQ ID NO: 243 - protein, 41 aa, Homo sapiens
PTKLLGKSLTSVLPLLSVFLYSFYFFFSLLLFRAFRVSYGQ

SEQ ID NO: 244 - protein, 98 aa, Homo sapiens
NKLENAKRILYSILFEIVLAYSHMKSSARRRATQYILISVLKMYLPTKPTFRRSSNNGILWEILWEASIKQTWKVWVDVEAEALCPLPTPFHFSHTLI

SEQ ID NO: 245 - protein, 33 aa, Homo sapiens
  misc_feature (32): Xaa equals any of the naturally occurring L-amino acids
TRKAVLFYVMPFLFIQAIPTICESNCLMNPGXS

SEQ ID NO: 246 - protein, 47 aa, Homo sapiens
HTKNHVNFQEGERYSCLRKPRLMCLPSGKSLQSRLGCAKFSYILGAL

SEQ ID NO: 247 - protein, 90 aa, Homo sapiens
LTHNLLSSHVRGVGSRGFPLRLQATEVRICPVEFNPNFVARMIPKVEWSAFLEAADNLRLIQVPKGPVEGYEENEEFLRTMLLSEEETES

SEQ ID NO: 248 - protein, 54 aa, Homo sapiens
  misc_feature (43): Xaa equals any of the naturally occurring L-amino acids
  misc_feature (46): Xaa equals any of the naturally occurring L-amino acids
  misc_feature (53): Xaa equals any of the naturally occurring L-amino acids
VFCRSHRWGKSRWFFAWVFIKRRFLQSCCWVFKATSFSQGTLXRNXVTVGGVXK

SEQ ID NO: 249 - protein, 60 aa, Homo sapiens
HCSWVGKWAFILKYMWKQGETRKEWQSYYPVLCIITGRCKMTFSSITLNVTPSSLTVIKL

SEQ ID NO: 250 - protein, 55 aa, Homo sapiens
  misc_feature (46): Xaa equals any of the naturally occurring L-amino acids
  misc_feature (47): Xaa equals any of the naturally occurring L-amino acids
ETLRNVNGRIRGSGGEDGGRVLNMVPGGGIHSFVYSEAVLLGHILXXICEFRSEG

SEQ ID NO: 251 - protein, 76 aa, Homo sapiens
  misc_feature (32): Xaa equals any of the naturally occurring L-amino acids
  misc_feature (38): Xaa equals any of the naturally occurring L-amino acids
  misc_feature (42): Xaa equals any of the naturally occurring L-amino acids
  misc_feature (68): Xaa equals any of the naturally occurring L-amino acids
LVDPPGCRNSARVWSTHVFGEGFYVKSGFPFXSSKLEXLASXGWNFPQAVVDGNKAWPPPVDGADAFXFATVHTTH

SEQ ID NO: 252 - protein, 136 aa, Homo sapiens
  misc_feature (107): Xaa equals any of the naturally occurring L-amino acids
ARAGALLLCEPAGPVYSRAARRPDAEETARLRALGAEVRVTGRGGLATFHGPGQLLCHPVLDLRRLGLRLRMHVASLEACAVRLCELQGLQDARARPPPYTGVWLDXRKICAIGVRCGRHITSHGLLSTALPTHVV

SEQ ID NO: 253 - protein, 51 aa, Homo sapiens
CLAHVFHAHYVSEFIFLPKTFSQMLPPQVFGLQLLLLVFKLGCPTSLIPQK

SEQ ID NO: 254 - protein, 115 aa, Homo sapiens
  misc_feature (98): Xaa equals any of the naturally occurring L-amino acids
GTGRLRLKKKKRKKKAHASIFHQFSPPSPSHCTQIVNICCFFFSLMLFPSLSGPLVQDTFFLCNSNLINSQVLMGNVPDRGGRPNELEPPMAHLGGAXEKVGGPQCWGRKKKKKN

SEQ ID NO: 255 - protein, 93 aa, Homo sapiens
  misc_feature (60): Xaa equals any of the naturally occurring L-amino acids
  misc_feature (78): Xaa equals any of the naturally occurring L-amino acids
ILRSPVLPLALSPFLFPFLPSSPRSLYALIGVSERERVGWREKILEAEVRSTFYLGLKTXSVDEICFKKNIQGTRFFXPKEPKWTFVMEEQRL

SEQ ID NO: 256 - protein, 85 aa, Homo sapiens
GCLVAQNNCQSSSLHLLILRESQRPALARCLLEVFPGSLETLLFISHWPEQSEMAIPCCRGGWEMWLSRWMRFCYRHKGSGGLRQ

SEQ ID NO: 257 - protein, 87 aa, Homo sapiens
  misc_feature (61): Xaa equals any of the naturally occurring L-amino acids
ARISFCSDAQNSRHLPPQLYPILLEDQDHVIFIAEHCTVLGVGLVPVRVCTMCEARWGPRXVHQVPSLAPSQSVLLCTAVAHGCQES

SEQ ID NO: 258 - protein, 27 aa, Homo sapiens
ELNLIHHNGKPIANDRLIFFFKWGQLF

SEQ ID NO: 259 - protein, 46 aa, Homo sapiens
  misc_feature (16): Xaa equals any of the naturally occurring L-amino acids
TCYLLSKLFLTPLLLXLYYPSWKNWPLFSLPCRLSIDCFHSTYVVS

SEQ ID NO: 260 - protein, 47 aa, Homo sapiens
  misc_feature (26): Xaa equals any of the naturally occurring L-amino acids
  misc_feature (40): Xaa equals any of the naturally occurring L-amino acids
  misc_feature (44): Xaa equals any of the naturally occurring L-amino acids
LGDHHKVAGILFCHVRALKKSSLLFXDGSAPLPRQEGMAXSGSXHLN

SEQ ID NO: 261 - protein, 24 aa, Homo sapiens
  misc_feature (2): Xaa equals any of the naturally occurring L-amino acids
  misc_feature (8): Xaa equals any of the naturally occurring L-amino acids
SXGEMVDXWPNSSSFFPALKIRWL

SEQ ID NO: 262 - protein, 115 aa, Homo sapiens
  misc_feature (25): Xaa equals any of the naturally occurring L-amino acids
  misc_feature (44): Xaa equals any of the naturally occurring L-amino acids
  misc_feature (66): Xaa equals any of the naturally occurring L-amino acids
  misc_feature (69): Xaa equals any of the naturally occurring L-amino acids
GPGTGVTNLMLSGSVATALGAGIPXSFEPDISSFCWSFSRSASXSMMRFPTPMSHSSPLSYVSTGXASXPFPPEAPLLKDILESTSHLKIQGSSLPPAFLFSASAMFSDLPHWSV

SEQ ID NO: 263 - protein, 108 aa, Homo sapiens
  misc_feature (81): Xaa equals any of the naturally occurring L-amino acids
  misc_feature (88): Xaa equals any of the naturally occurring L-amino acids
  misc_feature (98): Xaa equals any of the naturally occurring L-amino acids
GAAPQATADSTAERQRPRGVTQMAGPGNPAASHLELSYLPHPKHQLFLAPQAQNVGPESLAGVSGALGLALRLEGEGPRCXITRPQGXLCPAQHWPRXVLPPSAQEQD

SEQ ID NO: 264 - protein, 103 aa, Homo sapiens
  misc_feature (6): Xaa equals any of the naturally occurring L-amino acids
  misc_feature (20): Xaa equals any of the naturally occurring L-amino acids
  misc_feature (63): Xaa equals any of the naturally occurring L-amino acids
GLTVIXPRDPKSPPFFPGFXGPSPAPTPAPSSAQLSEIWFTPNPFLITASKPRQGDRPQKIPXPISAPEIAPREELCSLESIRLRVQAPVRGSRSSTLLPTWF

SEQ ID NO: 265 - protein, 60 aa, Homo sapiens
  misc_feature (38): Xaa equals any of the naturally occurring L-amino acids
  misc_feature (52): Xaa equals any of the naturally occurring L-amino acids
  misc_feature (53): Xaa equals any of the naturally occurring L-amino acids
  misc_feature (60): Xaa equals any of the naturally occurring L-amino acids
EDPRTSHMGMGVTTSMLAFIWKPCSPLGAPPAGPPLPXVQWFHEGSPWPMGXXSGASPHX

SEQ ID NO: 266 - protein, 123 aa, Homo sapiens
  misc_feature (99): Xaa equals any of the naturally occurring L-amino acids
  misc_feature (102): Xaa equals any of the naturally occurring L-amino acids
  misc_feature (104): Xaa equals any of the naturally occurring L-amino acids
GTRVSRHCSFLAWWVWWMSLFSRGCQGPVRQPGEHLPWPLIRVLSPAFSHVVENTAFFGDVVLRFPRIVHYYFDHNSNWNLLIRWGISFCNQTGVFQPXGPXRXILSLMAQELGISEEDSNFQ

SEQ ID NO: 267 - protein, 85 aa, Homo sapiens
  misc_feature (48): Xaa equals any of the naturally occurring L-amino acids
  misc_feature (74): Xaa equals any of the naturally occurring L-amino acids
  misc_feature (84): Xaa equals any of the naturally occurring L-amino acids
  misc_feature (85): Xaa equals any of the naturally occurring L-amino acids
QLRKPSSEADCCQLRRWMELLCRAERMAYSDEKFLRIRHSWGGKSRRXEGAQHTSDPGTERWWGRRGAPPSRSXNQAPASNRRXX

SEQ ID NO: 268 - protein, 97 aa, Homo sapiens
LRVVFWGPSSWGLLLSPLVIDRAQCLTFAGPGSPFWPVLARDTCSSQTLPARDSVPPWWSAPTVLQAELTFVHIQLFGPVGESSFRKGLGPVRGLTP

SEQ ID NO: 269 - protein, 51 aa, Homo sapiens
GRRARAGAKEGPRFPRLPSFAMVELDHKGKPESCQKHSHLHLTRSLLPLCG

SEQ ID NO: 270 - protein, 67 aa, Homo sapiens
  misc_feature (25): Xaa equals any of the naturally occurring L-amino acids
KLPYFREQTLELHRGGGRSRTSGSXGLQEFGTGHSHMSDLGTRSFSAGQYSYEVALANFLTTTHERP

SEQ ID NO: 271 - protein, 52 aa, Homo sapiens
RLLCLSSGNLRVASSLIAHLPFCSICLFDFIMTKSNFRLLYGWNLAQCIIFN

SEQ ID NO: 272 - protein, 54 aa, Homo sapiens
FCPTVSLMGAGAVTVLIHRSVYITQHSVCPVVGHHQTVVEGKEGGKRVFQKLVR

SEQ ID NO: 273 - protein, 110 aa, Homo sapiens
  misc_feature (13): Xaa equals any of the naturally occurring L-amino acids
PNCAEGSPCTSSXPAALPLAQKGGRTQLQAPSWFILRPRITFMHERAYWFQIPHLGTGIGGLFSKLLVLIAPAFQITSGNLWEEPRGWKMFLSFAKGRKLCHPAGDLSHE

SEQ ID NO: 274 - protein, 53 aa, Homo sapiens
SRHSISPPVNQIQLGASVTEELTVVTKTARVSRAQWLMPVIPALWEAEAGEIT

SEQ ID NO: 275 - protein, 37 aa, Homo sapiens
  misc_feature (10): Xaa equals any of the naturally occurring L-amino acids
  misc_feature (26): Xaa equals any of the naturally occurring L-amino acids
FKLSLFFMQXYVVTSYMVRNLNVKIXPNVDSDCRAVS

SEQ ID NO: 276 - protein, 95 aa, Homo sapiens
  misc_feature (17): Xaa equals any of the naturally occurring L-amino acids
  misc_feature (87): Xaa equals any of the naturally occurring L-amino acids
  misc_feature (89): Xaa equals any of the naturally occurring L-amino acids
VLVPPLYTQAPHCHQPXPQLPLSTAPPGSHVHRCTRSSLCLHTETRTSQCPVHVGQPVKLQSQQTSQDTRTYWVPRQSPAQPSHRRXAXRGVSGL

SEQ ID NO: 277 - protein, 100 aa, Homo sapiens
  misc_feature (73): Xaa equals any of the naturally occurring L-amino acids
  misc_feature (78): Xaa equals any of the naturally occurring L-amino acids
  misc_feature (82): Xaa equals any of the naturally occurring L-amino acids
PGLLGMSPCQPPCLRWGRAHRLPLSVHDHTFLPDLIQISFFSKPLNPSGCRFCLKQSWLSCIGCCVGTRWGVXKSWEXKKHXRVFIKEKPRGVILPVLNM

SEQ ID NO: 278 - protein, 53 aa, Homo sapiens
  misc_feature (16): Xaa equals any of the naturally occurring L-amino acids
  misc_feature (24): Xaa equals any of the naturally occurring L-amino acids
IRQRSRWPSRLPHARXGRVAVHGXSPTTSVSSLTERAVHRHLHPLGNLQRLGM

SEQ ID NO: 279 - protein, 136 aa, Homo sapiens
  misc_feature (94): Xaa equals any of the naturally occurring L-amino acids
  misc_feature (115): Xaa equals any of the naturally occurring L-amino acids
  misc_feature (121): Xaa equals any of the naturally occurring L-amino acids
ARARAGNCAAGTAGDSGIRAGGSGRRAVGSYGDAPFLGVPIQRRLGAPCPAALGSDRGAESLSEDSRDPFDSGPSSPTLSRAPGSVKKSRPPEXGEEHGGERRPTQRRRKGAPWXPWLGLXFLGARNAASPRKLQW

SEQ ID NO: 280 - protein, 89 aa, Homo sapiens
GTREIFGLESGVCPTGVALDLRMLPGLCSRDPRTWRVKTGMTAGEGVCCEGRGDKAFPGNGKLPPPTHGACAQNGLSSYRMDAQYSLIK

SEQ ID NO: 281 - protein, 96 aa, Homo sapiens
  misc_feature (78): Xaa equals any of the naturally occurring L-amino acids
RSQPRRDPRVPAPAPSNGQDLGSAGEKQVGKRPSMDGYPRTLPYVRWGGQGGQSVGRCTKPRHPRPEVPAVEERTQRXSICSRGRSRETLCSRREI

SEQ ID NO: 282 - protein, 121 aa, Homo sapiens
  misc_feature (60): Xaa equals any of the naturally occurring L-amino acids
  misc_feature (118): Xaa equals any of the naturally occurring L-amino acids
  misc_feature (120): Xaa equals any of the naturally occurring L-amino acids
GTSAILFPVVWSIRHLQDASGTEEKVAVNLAKLKLFRHYYVMVICYVYFTRIIAILLQVXVPFQWQWLYQPTGNNPYLQLPQEDEEDVQMEQVMTDSGFPGKALQSQQNSQRAGIVMXHXH

SEQ ID NO: 283 - protein, 109 aa, Homo sapiens
  misc_feature (109): Xaa equals any of the naturally occurring L-amino acids
GLRLGWGGVETHWNLLFSGPQHMWTEPFKHPRNTGEESRSPPASSAKALSLPFPTGSGQWLFPPGAWDSTLLSQHRTRWAGGKQGKGQRGDGRRRIKCHAWQQPKLGKX

SEQ ID NO: 284 - protein, 29 aa, Homo sapiens
AGRQEQTREREKKSRGLTNNPKALNSLVR

SEQ ID NO: 285 - protein, 77 aa, Homo sapiens
  misc_feature (73): Xaa equals any of the naturally occurring L-amino acids
GTAETESEMTLSPLWCLYRDPPSWDPYIVHTGIPTPLQDLPVCPGLVPVQWGMSLMVPLPHSHSVYLLLHLQXLESE

SEQ ID NO: 286 - protein, 81 aa, Homo sapiens
  misc_feature (79): Xaa equals any of the naturally occurring L-amino acids
GTAEFLQALATSRTAVWHDVGPDCGSGGQCRALSNASLCLQHGNQKTGFGGTESQACMWIINFISAPDGRQLIKRMGFXVS

SEQ ID NO: 287 - protein, 41 aa, Homo sapiens
NNVDLQLKTQPLGFRVCKPSPEMSLELFHSCSRADSREDRY

SEQ ID NO: 288 - protein, 146 aa, Homo sapiens
VADQEAPGRCRPAWCRGWPSASYWGLLQGPSLCRRKETLTRSCRPCPTGLSPPLTSGTMCSTSRPWGPTPRSRTWPEPSLPTSPWGARWASTFPIRRTEWCPAWCPPTPPGCTRSGLHRHGVPAKTWPLQESGLVSRSINSGLKMQ

SEQ ID NO: 289 - protein, 100 aa, Homo sapiens
  misc_feature (4): Xaa equals any of the naturally occurring L-amino acids
  misc_feature (7): Xaa equals any of the naturally occurring L-amino acids
  misc_feature (11): Xaa equals any of the naturally occurring L-amino acids
  misc_feature (22): Xaa equals any of the naturally occurring L-amino acids
  misc_feature (45): Xaa equals any of the naturally occurring L-amino acids
KKKXELXPGSXGNRGTQLVAWXWEGHREKQWRLPGFLARPETGRXQALKLLQHQESPNTATACGARSRPWKQPWGDGATAWKPWGSLLVLPMPETRGLGP

SEQ ID NO: 290 - protein, 75 aa, Homo sapiens
  misc_feature (66): Xaa equals any of the naturally occurring L-amino acids
  misc_feature (69): Xaa equals any of the naturally occurring L-amino acids
  misc_feature (70): Xaa equals any of the naturally occurring L-amino acids
  misc_feature (72): Xaa equals any of the naturally occurring L-amino acids
  misc_feature (75): Xaa equals any of the naturally occurring L-amino acids
CPLESISNTKNSWPGAVAHAYIPRTLGDQGRRDRLRPGVQDQPVQHGKTFLSIKQKQRILWQQFMXLSXXLXQTX

SEQ ID NO: 291 - protein, 73 aa, Homo sapiens
  misc_feature (25): Xaa equals any of the naturally occurring L-amino acids
  misc_feature (54): Xaa equals any of the naturally occurring L-amino acids
  misc_feature (58): Xaa equals any of the naturally occurring L-amino acids
PRSEEIPSGEPGTRELLPTKAQPAXPGPSETASICESGGRRRTGITWMTACVRXDLSXAHHSPVKGEETDSSE

SEQ ID NO: 292 - protein, 86 aa, Homo sapiens
PRPGSTLHLTRGSCPWVGGSGLLGFPRKWGQGVKEGWCLRSLPLPTAQLPLWGLRDPPGPSSDTGLARQVAFQQASFFCKQISPLY

SEQ ID NO: 293 - protein, 109 aa, Homo sapiens
  misc_feature (86): Xaa equals any of the naturally occurring L-amino acids
  misc_feature (101): Xaa equals any of the naturally occurring L-amino acids
WIPRAAGIRHEHCLPTSTPAPCSPSPKELSPSLPPHTQSPDLSLPICPLGGPDPSRSPSSVLSKGQAVTGQYRFLARSGGYLWTQXQATVVSGGRGPQSEXIVCYFLIR

SEQ ID NO: 294 - protein, 68 aa, Homo sapiens
  misc_feature (43): Xaa equals any of the naturally occurring L-amino acids
TRARMRPTSIMASRIPWAASAGSLVLGGTPRGGTEQELEPGRXGGASGQHGEPPLRWPPAGLPPQVED

SEQ ID NO: 295 - protein, 92 aa, Homo sapiens
  misc_feature (67): Xaa equals any of the naturally occurring L-amino acids
  misc_feature (71): Xaa equals any of the naturally occurring L-amino acids
  misc_feature (85): Xaa equals any of the naturally occurring L-amino acids
EATKSAKNNVLHTISHQSSINVNYCYVLSLFFQTGSLCRPGLSAVACSWAHYSLNLQGLQAVAATSXSLVXGDHRHTPAHVGHFXIFFGETG

SEQ ID NO: 296 - protein, 37 aa, Homo sapiens
  misc_feature (23): Xaa equals any of the naturally occurring L-amino acids
  misc_feature (36): Xaa equals any of the naturally occurring L-amino acids
IIKFTIKIEGLTYWSFKLSSCTXCMKVYLNAIYTCXK

SEQ ID NO: 297 - protein, 48 aa, Homo sapiens
SAGEITEITGPMVQVPTPRTLVPLCAQKEALKRVVSFLVGRSGSHLQS

SEQ ID NO: 298 - protein, 56 aa, Homo sapiens
  misc_feature (5): Xaa equals any of the naturally occurring L-amino acids
  misc_feature (41): Xaa equals any of the naturally occurring L-amino acids
VSLSXCTPRAGEGLKLSSLRSNTFRVSCRSGQRTRPSLGKXKASKGRFYYSHISIW

SEQ ID NO: 299 - protein, 46 aa, Homo sapiens
CLSKFAFDISLMRFCCYVIFFGYASVQHLINHNTVIIIWKYVLWKE

SEQ ID NO: 300 - protein, 53 aa, Homo sapiens
SEQGYRRELEPHSLILSLYITFRVFVSLSSLVWGTVGLGWYPVILCDEGIHWR

SEQ ID NO: 301 - protein, 183 aa, Homo sapiens
STEEEGVRDGAGESSPGSGSREPGAAGRESGAGQTRTGTAGGESLPTGSLSQRDWTGSLAEPAERVGLRLTTSLFRDSPAGDHDYALPVGKQKQDLLEEDDSAGGVCLHVDKDKVSVEFCSRAPGRRRLLLKFSFLGDFLPARLRCRGYRTVVPASQPVDTAVGAEETGPAAGHISCFILKGS

SEQ ID NO: 302 - protein, 79 aa, Homo sapiens
VPPGSSPITCLSPLRNCEMAPPEHPRPSCNNPGPLVTLKCSNEGASAGSFLVGAQQKACTLTETKHRVRKKTPNTAAFS

SEQ ID NO: 303 - protein, 78 aa, Homo sapiens
RLRKSPASFEEPGYLSPEQNKNSDEKWRMYVEQAPGVSMPGFFFSAFHRLYFCLFTLQDMWHVCLKQALLSDFCALGT

SEQ ID NO: 304 - protein, 95 aa, Homo sapiens
PRSERSWRTAGREWRRRPLLSSIALADASMGATRGPEQALPGGPRASSKGEPDEPRTSFEVTLLRPDGTVRLWTGIKKGPHANSNSLSLKRWWKS

SEQ ID NO: 305 - protein, 75 aa, Homo sapiens
  misc_feature (36): Xaa equals any of the naturally occurring L-amino acids
  misc_feature (39): Xaa equals any of the naturally occurring L-amino acids
SKTYLLHIFKKAIGWASWLIPIIPALWEAKREDCLXPGXQDWPGQQREILSPQKLKKKNSKVQWHSVCRPGYSGG

SEQ ID NO: 306 - protein, 85 aa, Homo sapiens
SQHFGSPMQVDHMRSGVRDQPGQHGKTPSLLRIQKLARCGGACLWSQLLRRLRQENRLNLGGGGCSEPRSCHCTPAWATEQDSIS

SEQ ID NO: 307 - protein, 103 aa, Homo sapiens
  misc_feature (38): Xaa equals any of the naturally occurring L-amino acids
LPMWNGLWVLVPLLGHRGKLQGFCCDIEGRHQPSKTFXSYPLGILLFGQSWSIGKLMGICQSFFVSFGSCLASIGRVFGVILRKELQWFGGVFCSGPSFGNRC

SEQ ID NO: 308 - protein, 51 aa, Homo sapiens
FHDSLGYREGRGVVLFEQKSSQDPGKEIFLRNQWHMRLCSLTGKVKVSALF

SEQ ID NO: 309 - protein, 63 aa, Homo sapiens
KCICQDLKDSESDSSSEEERRVTTRVIRRRLIIKVSCSWIIMWHCSTIRNSFLVVVETPSLWL

SEQ ID NO: 310 - protein, 81 aa, Homo sapiens
  misc_feature (7): Xaa equals any of the naturally occurring L-amino acids
RGCIFIXFLIHKAIFPLPQLSSPPELTSRKMGKGSCLLLFLCTTVHCLPLWALSRWTVLKPKETQTALDWIQFSQDRLGKL

SEQ ID NO: 311 - protein, 54 aa, Homo sapiens
  misc_feature (7): Xaa equals any of the naturally occurring L-amino acids
  misc_feature (14): Xaa equals any of the naturally occurring L-amino acids
  misc_feature (29): Xaa equals any of the naturally occurring L-amino acids
  misc_feature (47): Xaa equals any of the naturally occurring L-amino acids
LEHSLGXGTQTWLXLVTTRNVYENADSWXPPKRTESESESAVEGEMXVKPKVCL

SEQ ID NO: 312 - protein, 118 aa, Homo sapiens
  misc_feature (19): Xaa equals any of the naturally occurring L-amino acids
  misc_feature (21): Xaa equals any of the naturally occurring L-amino acids
LGYFFIKYPPNTVLLKYFXGXNSLIIRTVGSRLSREHFQFRKLLIVLATTQKRGIATRLNMLVKYLSESMVYSSLSEHLTIHSNSYPSIHPSIHPSIHLSTHLSIHPFIHLLFYKAGD

SEQ ID NO: 313 - protein, 73 aa, Homo sapiens
  misc_feature (69): Xaa equals any of the naturally occurring L-amino acids
ISNSLSQYQNFFSFVTGSVTINNIKQLDELMKATGYMISVNREHSEMKKKFANFLLEQNILLEHNSHSXNIQL

SEQ ID NO: 314 - protein, 60 aa, Homo sapiens
VQRGSCILTEVQNSFLVGVMRLPFFLSLFFMQYINMKPSSPFIALDQWFAVGGSFASRGC

SEQ ID NO: 315 - protein, 67 aa, Homo sapiens
GLCRCNLVQMRSYWIRAGPHPITVVLIRIGKFGCRDTEKMPCEDGSETEVMRLQAKECEEWPATTGS

SEQ ID NO: 316 - protein, 58 aa, Homo sapiens
  misc_feature (8): Xaa equals any of the naturally occurring L-amino acids
  misc_feature (9): Xaa equals any of the naturally occurring L-amino acids
SGVLFRGXXQYVMTLCGHMEQSNRELHTLNLVLAFSLYLIWPSIFFLLFSFFLVNWLD

SEQ ID NO: 317 - protein, 53 aa, Homo sapiens
VSGVRKRGNKACLASDQSVPGYQPTSPYTLDALRPLPPGGHLSCDGIPWRIVI

SEQ ID NO: 318 - protein, 77 aa, Homo sapiens
  misc_feature (22): Xaa equals any of the naturally occurring L-amino acids
  misc_feature (58): Xaa equals any of the naturally occurring L-amino acids
FREQCFPRIVTEDFLNGVIMYXLIKTGLTAVAHFLLLKEVLFVLFLTTFNKELRSSVXLRFVRNCRFLNKARIYRHD

SEQ ID NO: 319 - protein, 56 aa, Homo sapiens
  misc_feature (1): Xaa equals any of the naturally occurring L-amino acids
  misc_feature (4): Xaa equals any of the naturally occurring L-amino acids
XLAXLLKSHILIQILKILFRSSPCEHVKGKLGMFIYKLSLSVKNSVTIKIAILGLK

SEQ ID NO: 320 - protein, 172 aa, Homo sapiens
  misc_feature (22): Xaa equals any of the naturally occurring L-amino acids
  misc_feature (24): Xaa equals any of the naturally occurring L-amino acids
  misc_feature (26): Xaa equals any of the naturally occurring L-amino acids
  misc_feature (31): Xaa equals any of the naturally occurring L-amino acids
  misc_feature (35): Xaa equals any of the naturally occurring L-amino acids
  misc_feature (37): Xaa equals any of the naturally occurring L-amino acids
  misc_feature (50): Xaa equals any of the naturally occurring L-amino acids
  misc_feature (53): Xaa equals any of the naturally occurring L-amino acids
  misc_feature (55): Xaa equals any of the naturally occurring L-amino acids
  misc_feature (57): Xaa equals any of the naturally occurring L-amino acids
LSAAPVAILSDECLQGRQLQNXNXSXDGANXFQSXYXRFTVATFALLDSXSQXAXRXLVYLFCSTSACHTSGLETCSTACSTGTTRQRRSSGHRNDTARPQDIVSSPGPVGFEDSYGQEPTLGPTDSNGNSSLRPLLWAVLLLPAVALVLGFGVFVGLSQTWAQKLWESNRQ

SEQ ID NO: 321 - protein, 186 aa, Homo sapiens
  misc_feature (121): Xaa equals any of the naturally occurring L-amino acids
VWMQGTQHPPSFWGLGLLGPPFLGQEPLPLGWTACLCGAGLPCEEGLAGAGAWSGAGAGTEVGNRWGPQHRSCPHPSIRADRTYLPPRPPEIGMGHRRQGVTHPILFSSPSLPACAWNLKXAQPGWLAWDWHSVPPLRHQGQPRGGEERGLVCNSQSQIFLIQAITGRGSQGQGHSGTLLGSGPTW

SEQ ID NO: 322 - protein, 107 aa, Homo sapiens
  misc_feature (15): Xaa equals any of the naturally occurring L-amino acids
  misc_feature (83): Xaa equals any of the naturally occurring L-amino acids
RRVSISTSRRARPHXQHPPGGRDFGLVIPRCCDSAHDSSWSPLAPRKYLSNDSMNLPPDRPGLLSLSVSPEVETTPPALASGXPCALPWTVGCSGSDAVTALCPSLR

SEQ ID NO: 323 - protein, 100 aa, Homo sapiens
  misc_feature (23): Xaa equals any of the naturally occurring L-amino acids
  misc_feature (67): Xaa equals any of the naturally occurring L-amino acids
  misc_feature (94): Xaa equals any of the naturally occurring L-amino acids
SLGPGGSHPRLPLAPLQCDSANXPPSTCQAPTWHRPVWATVSPAPSLLGTLCWWPWLPTQHHLRLSXLHHQWPEEGQSTAAVCGEPEGGARDLXGQGLPV

SEQ ID NO: 324 - protein, 64 aa, Homo sapiens
RFFTVGPAASFILIITRNYFLPQHFTMKIFGQAQWLMPVIPALWETEVGESPEVRSSRPAWPMW

SEQ ID NO: 325 - protein, 81 aa, Homo sapiens
AASYQPGPEQARWTMLHHLNAPGCVLERSFQKPPNFISPCRGMMTPASVGSCLRKLNAARRTYCLFQPKPGDREIGPGTPL

SEQ ID NO: 326 - protein, 103 aa, Homo sapiens
  misc_feature (35): Xaa equals any of the naturally occurring L-amino acids
  misc_feature (93): Xaa equals any of the naturally occurring L-amino acids
ALSTISCSVLQNWPHVKRLWRNYRSSWGRRNLHQXEADGDEKSIPESRNGKKDCCCPLTKDTLRPGADLLPWLASVEVGKEGRNAQLGVLSPXAESADQSYSC

SEQ ID NO: 327 - protein, 99 aa, Homo sapiens
EWGDMFLPPFAGSQTIPPLLTPDLKIQGETHDSIEDARTALQLYRKYLELSKNGTEPESFHKVLKGLYEKGRKMDWKVPEPEGQTSPKNAAVFSSVLAL

SEQ ID NO: 328 - protein, 68 aa, Homo sapiens
  misc_feature (36): Xaa equals any of the naturally occurring L-amino acids
IKFTRNVGHAHSFTCNLWVVFVLLWAELNTCSGNLXGLQGVFEYLALHRKSLLTWIGCACVYHRKLHQ

SEQ ID NO: 329 - protein, 39 aa, Homo sapiens
TLVFISLAQIQLLGHMVLRKLLPFPQAFPGKKLFKINIL

SEQ ID NO: 330 - protein, 95 aa, Homo sapiens
NSARDFLPVCINSPHQGLFVDTVSHVKQMNRVHIKCLLNMRVGCRKIPTEPSAAHIFSTREPGLLLDYRNRKIINPSFCPLRAYVLGEGKGHEMK

SEQ ID NO: 331 - protein, 147 aa, Homo sapiens
IRSLLCLQHSAFRGTPHVSTGHTASDLIWIHSSAFLSQSPRGPQPRRPFLPQMSSALYRAWVFSLSLCLEHSFFPLLSCLLLFTLQVSSSCHCLREVFLCSLCFSQEALLFSIMPLITAYNRIFISVSTVLPCQTVSPMWAGAHDCF

SEQ ID NO: 332 - protein, 59 aa, Homo sapiens
TIGLYICLSIMPNMQVCLNYSLKICVFWVSSTSSISCLFWVIGQMGSTFYSHFRLWESF

SEQ ID NO: 333 - protein, 77 aa, Homo sapiens
  misc_feature (47): Xaa equals any of the naturally occurring L-amino acids
NVRKIVSVFEECHIFMQNIIQLHQVKVNEMQRILFILKDQKECDCFXGDFFLFAVIRALFSPDPSNKINNRMQCESL

SEQ ID NO: 334 - protein, 157 aa, Homo sapiens
  misc_feature (35): Xaa equals any of the naturally occurring L-amino acids
  misc_feature (57): Xaa equals any of the naturally occurring L-amino acids
RLAGPRDTQQGGMKVPTISVTSFHSQSSYISSDNXSELEDADIKKELQSLREKHLKXISELQSQQKQEIEALYRRLGKPLPPNVGFFHTAPPTGRRRKTSKSKLKAGKLLNPLVRQLKVVASSTGWTAYHPTSERVTYKSSSKPRARFLSGPVSVSI

SEQ ID NO: 335 - protein, 42 aa, Homo sapiens
KSLKRILKKINSVNISYIVGFMHNIIWLICIINKSILRSKKK

SEQ ID NO: 336 - protein, 42 aa, Homo sapiens
SGTSKFQKLYLPSVVLSLPHQTVLLQNVGAFSLLPPINWHGS

SEQ ID NO: 337 - protein, 67 aa, Homo sapiens
IRQSSHLVFKVSLVFVAFPLLLWHFSHFLAHFHPYYMCPFFPLTSLIVFLILFFKTIASSGSGGSCL

SEQ ID NO: 338 - protein, 74 aa, Homo sapiens
KTSLESADVQPNAGLPVKGLALAVFSPLNAGWLCTDPSTPPGLLELLTQDTSSQPQMTQHTLRRPRAHACLLLS

SEQ ID NO: 339 - protein, 50 aa, Homo sapiens
EIIMSRMRKKYSFLYLRKTIVAQCCGLKGFENNAISDKNKCHYSCLLSLF

SEQ ID NO: 340 - protein, 49 aa, Homo sapiens
CIHLVCSVISEDIEMFDEMNEDTECRFSIKLYLITVTFLLHANPIHTII

SEQ ID NO: 341 - protein, 120 aa, Homo sapiens
  misc_feature (74): Xaa equals any of the naturally occurring L-amino acids
  misc_feature (110): Xaa equals any of the naturally occurring L-amino acids
FGTSPGGRHRAAGKPTGGHNLGLQQKCFQNRQQRWGTGWESMNVQLDGAEPQVERGSQEERPWRTVPGPLEHLXCDLEEEPQSLQEKAQSAPWVPAIPQEGEHWRLGRLXAALLCGGSQD

SEQ ID NO: 342 - protein, 49 aa, Homo sapiens
  misc_feature (27): Xaa equals any of the naturally occurring L-amino acids
AMRRNTAETLGEYHRHIVGMKKSNIRXIYEYMVSFIKKFKGEPSEHVIS

SEQ ID NO: 343 - protein, 90 aa, Homo sapiens
  misc_feature (72): Xaa equals any of the naturally occurring L-amino acids
  misc_feature (78): Xaa equals any of the naturally occurring L-amino acids
GGTSVHFHQAAWKCSSSQGIGEVSQEASASMGEIINPRLNAASDLNGMGKNKIPKGSKLFPGVGFNCYSPGXKASRDXFLGITVLLSPAT

SEQ ID NO: 344 - protein, 279 aa, Homo sapiens
  misc_feature (187): Xaa equals any of the naturally occurring L-amino acids
  misc_feature (259): Xaa equals any of the naturally occurring L-amino acids
  misc_feature (275): Xaa equals any of the naturally occurring L-amino acids
VMTQTCRSSCVSLWAPHQPTCCLAPHGALLRQGWGVRLRGRTMWEHQWASGGQICCLGGVLGGHAAHIHSSLHLCSSLQYESQTSFGSMYPTRIEGATRLFCDVYNPQSKTYCKRLQVLCPEHSRDPKVRFSLSSSHFAPPPCLAVPHSSLPSSPHFSFTFSSQLPCCFTLHSSFSMPPHRSLNPPXFSFSLLEPPFLFSLITAIHPPNLASLQVPADEVCGCPLVRDVFELTGDFCRLPKRQCNRHYCWGEAAACGSXIWSACVFWYKLDELFXARAN

SEQ ID NO: 345 - protein, 78 aa, Homo sapiens
  misc_feature (8): Xaa equals any of the naturally occurring L-amino acids
IIYKFVAXLILRLLYSLATQCSLWSGSVTPLGYLAEMQLLRLHSSSPQSQSVFLFVCLFVPRSRRCTPAWATRVVSKN

SEQ ID NO: 346 - protein, 49 aa, Homo sapiens
QKETLSQKKKKTKKKQDGLAQVWWLTPVIPALWEAEMGGLLEPRSSRPA

SEQ ID NO: 347 - protein, 43 aa, Homo sapiens
ELPVSCKNSVGLPHLKETDTAHRNLAKHQKRGEEKRWYQKSRV

SEQ ID NO: 348 - protein, 47 aa, Homo sapiens
TLSPFHWLVLAINKKSRPGAVAHTCNPSTLGGRGGWITRSGDRDHPG

SEQ ID NO: 349 - protein, 106 aa, Homo sapiens
CHPHPPHFHTASEASCTKRYMYSKTKIENQHSRVEVGYKYTQIPADLVTRGEHQMEIEVSGGQERKRDVTTILFQNVFPGIASWEKWFLGQIDLGKLLFIFTDSGE

SEQ ID NO: 350 - protein, 56 aa, Homo sapiens
PGRGNKHLFSNSTVSLDLIEVLDFQLPVLLPQIITDETKQATPFGGPVESAAPSGS

SEQ ID NO: 351 - protein, 78 aa, Homo sapiens
  misc_feature (61): Xaa equals any of the naturally occurring L-amino acids
  misc_feature (75): Xaa equals any of the naturally occurring L-amino acids
QLDCLKNLLYLIMTRLCAGVICFLLFCSPNTLFNLVTFIFKLYGTLLNKHSLLIKICPLNXPQHLNTIYFITPYXGYP

SEQ ID NO: 352 - protein, 104 aa, Homo sapiens
AMAQMQGEESLDLKRRRIHQCDFAGCSKVYTKSSHLKAHRRIHTGEKPYKCTWDGCSWKFARSDELTRHFRKHTGIKPFRCTDCNRSFSRSDHLSLHRRRHDTM

SEQ ID NO: 353 - protein, 77 aa, Homo sapiens
QTLKQYLYIYLLQGQIQSLEVASLVYFICPRALLTLRTHPKILKNVIWILPHLMLFLAVGCQPYSASFHWVSLLDGE

SEQ ID NO: 354 - protein, 190 aa, Homo sapiens
WGTENTKAGLSSPGDKAATEAYTFACLKIRVQRQWKHLGPWPCLGLDKLKQLFLLWPCSPKTNILYLVAEYSNPGPARGHGSLQGEADSQICWQMTPILTFSMGDACPEEQDPEGRFVARLPSSFHLSRLPFLHKDDDGNKMTGVMPGTKVLILPPTATFLSFTLARNNHEGWVCFGKCLSLYLNDKELN

SEQ ID NO: 355 - protein, 76 aa, Homo sapiens
  misc_feature (53): Xaa equals any of the naturally occurring L-amino acids
VPVHKGGSGPTVAQILQIIQKLPEFWIFMQISQFLKMLASNSECFNQPHCVGXGKQPKGQVKLQFSTAALASPRAP

SEQ ID NO: 356 - protein, 44 aa, Homo sapiens
DLKVKITVKFLFNDHLLLKINIGLTPIMCLAQKSIPQDKHNIKV

SEQ ID NO: 357 - protein, 65 aa, Homo sapiens
  misc_feature (13): Xaa equals any of the naturally occurring L-amino acids
  misc_feature (27): Xaa equals any of the naturally occurring L-amino acids
SSSQNPGKILLPXYYKGYYKGDRCVAXWKRCRGQGTWGRGMELPCSLWACHFLGSPHVFSYPEAL

SEQ ID NO: 358 - protein, 123 aa, Homo sapiens
  misc_feature (28): Xaa equals any of the naturally occurring L-amino acids
PTRAECCLLLARPLRGPKLGLWPLPGQXLGRPGVMAPQALKPGAAIDRGTSNGLAEAWDHLAFSSESLPACVPARHPSLPAALRVSNLPFVLMHFCFNLFSRHHCSLVIPSVPLPYGNNKSLS

SEQ ID NO: 359 - protein, 61 aa, Homo sapiens
  misc_feature (44): Xaa equals any of the naturally occurring L-amino acids
KILNILIFKSVQGISCPVRLHIVFLGLLTGSGKLGSESLPGSEXLFPWPCPAHPSTLSACF

SEQ ID NO: 360 - protein, 41 aa, Homo sapiens
WVMTDSICKPHGNLQSKNIQEIHKKIKSKKLSHTTRENHLS

SEQ ID NO: 361 - protein, 88 aa, Homo sapiens
IGYPQTFRYLVNKLILYYYLGDLFENYCRNDDLVTFGRFCYGVTVILTYPMECFVTREVIANVFFGGNPSSGFPHWLVTVMVITVATP

SEQ ID NO: 362 - protein, 44 aa, Homo sapiens
QRAWHFVSAEKKISHCQGMLSLTPIFFHLVTLLPAPTEQWPLGG

SEQ ID NO: 363 - protein, 35 aa, Homo sapiens
  misc_feature (8): Xaa equals any of the naturally occurring L-amino acids
FCKNQTSXKPIENLYILLYVFMDLISSKIPIFSVP

SEQ ID NO: 364 - protein, 68 aa, Homo sapiens
  misc_feature (58): Xaa equals any of the naturally occurring L-amino acids
  misc_feature (64): Xaa equals any of the naturally occurring L-amino acids
  misc_feature (67): Xaa equals any of the naturally occurring L-amino acids
YEAKLSLQKPFPLDSRGSHPLDGRLFPWTEAGGFEGVDPGMEPSFFSSSPVCYFIQFXAQLKNXSSXG

SEQ ID NO: 365 - protein, 62 aa, Homo sapiens
  misc_feature (7): Xaa equals any of the naturally occurring L-amino acids
  misc_feature (19): Xaa equals any of the naturally occurring L-amino acids
  misc_feature (24): Xaa equals any of the naturally occurring L-amino acids
  misc_feature (57): Xaa equals any of the naturally occurring L-amino acids
NNTNTLXKLCPTFSTHSPXNSIPXYRYPGKISMYLHRNNCVRMFIVTCAHSYQVNLXPIRKW

SEQ ID NO: 366 - protein, 67 aa, Homo sapiens
YYFITCLAATHAIEFPRIPRALWPLWINCSNVCEFSKLTYLHHKCKDICSGLGKNSNSLQSNKNNNV

SEQ ID NO: 367 - protein, 95 aa, Homo sapiens
  misc_feature (8): Xaa equals any of the naturally occurring L-amino acids
TAPPKLLXGIWNLKFPLMEASHGSPALAQVLQKDVGKRLQVGQELIDYFSDKQKSADLEHDQTMLDKLVDGLATSWVNSSNYKVVLLGMDICPPW

SEQ ID NO: 368 - protein, 66 aa, Homo sapiens
RWGLGGLPPPLPALLSADPLPLTRVLASLNGTVVLVLRAHKKPSGGWVRWRTPVIPALWEAEVGGS

SEQ ID NO: 369 - protein, 110 aa, Homo sapiens
  misc_feature (73): Xaa equals any of the naturally occurring L-amino acids
FFVITFLIFLCSSCDREKKPRQHSGDHENLMNVPSDKEMFSRSVTSLATDAPASSEQNGALTNGDILSEDSTXTCMQHYEEVQTSASDLLDSQDSTGKPKCHQSRELPEF

SEQ ID NO: 370 - protein, 104 aa, Homo sapiens
  misc_feature (33): Xaa equals any of the naturally occurring L-amino acids
  misc_feature (72): Xaa equals any of the naturally occurring L-amino acids
TRESRTLLLRIVSDCQEPEKYVLQHSSACPRPXGASESPPPSAASPRARPPLLPAVTPRVASSTRPERRGEXRAAADLPRWHRSHKPTRNCKANKAEILDWSQS

SEQ ID NO: 371 - protein, 46 aa, Homo sapiens
ARSRVGQPGRKLLTLSDAPTSAFQSAVITGMSDHVWPIIYILPLRI

SEQ ID NO: 372 - protein, 52 aa, Homo sapiens
  misc_feature (14): Xaa equals any of the naturally occurring L-amino acids
LTGRQVNTVGSKTXSYSQPLVLGACFCVCAHAVIPGWPGHLERFPGAGDMSF

SEQ ID NO: 373 - protein, 65 aa, Homo sapiens
LTFFFIRHTHKWTLHRYIYILYVFVCVYLHILYLLTFKLKCAKELKFLQYAAISITAWLSPNQEA

SEQ ID NO: 374 - protein, 46 aa, Homo sapiens
  misc_feature (45): Xaa equals any of the naturally occurring L-amino acids
NKSQSHCNWQSFINLYKFSYNKGEDPTPLEPCHQVFASDSCSVFXK

SEQ ID NO: 375 - protein, 62 aa, Homo sapiens
SPRVKEENIGTHFVPHVPHRLETENDVNFCGIHSPIFPPYLYYPVLIFFSNYKDNTCSLWEI

SEQ ID NO: 376 - protein, 67 aa, Homo sapiens
QFQVLFVFYHSTIFTVFGLLIVKSICFLEACFMLQRVSPSSLSILKAEQPASDHVKKNDLTWNRSQK

SEQ ID NO: 377 - protein, 58 aa, Homo sapiens
SIHYSSPKVTSLSSDFLLGPVPCTFFTVFKCHSYQATIMDIMYPSWCSHTCHLVKHGH

SEQ ID NO: 378 - protein, 125 aa, Homo sapiens
NGGHVVQPCGLGRAGTFQVRSSQEEFLLRKLVQGTLRCLPVPKRWARTVGLKVFPSAILGPFPQLSRGFFRDVGRVVWKTLGVFRGPLTFMGTPRGPWCGSRNVLWGLVPSPPLKKTLSRTRKGT

SEQ ID NO: 379 - protein, 99 aa, Homo sapiens
  misc_feature (74): Xaa equals any of the naturally occurring L-amino acids
  misc_feature (78): Xaa equals any of the naturally occurring L-amino acids
  misc_feature (99): Xaa equals any of the naturally occurring L-amino acids
ARRGQWCSTNFYTAIAQAFLSNEKLPNLECIQNANKGTHTSLMQRLRNRGERDREREREREMRRSSGLRAGSRXDRDXVKFCIFEFNTTFFGLNLGDRX

SEQ ID NO: 380 - protein, 80 aa, Homo sapiens
SSLVPPSRYKALPFAYLSAATGSERADFSFSVLYKEFPCLGSNENVDTFTRDPEVVIAVTTWDKTLTSSHLAQCSFQCFY

SEQ ID NO: 381 - protein, 101 aa, Homo sapiens
  misc_feature (23): Xaa equals any of the naturally occurring L-amino acids
  misc_feature (26): Xaa equals any of the naturally occurring L-amino acids
  misc_feature (58): Xaa equals any of the naturally occurring L-amino acids
  misc_feature (62): Xaa equals any of the naturally occurring L-amino acids
  misc_feature (82): Xaa equals any of the naturally occurring L-amino acids
TQSAQLLKKSLAIEWRTGYREKXLGXGLLRDPIAISRQEIIAVEEGARHCQDKPGGFXHGLXGGYKRNRNRGGFPSFRPRNXRTEFAFTRREVSPGEHISH

SEQ ID NO: 382 - protein, 51 aa, Homo sapiens
VSKVIKVIQMSCCKNFAYYGGGRCGEKWLDLRDIYEAKLTVVDDGLDRGEN

SEQ ID NO: 383 - protein, 105 aa, Homo sapiens
  misc_feature (44): Xaa equals any of the naturally occurring L-amino acids
  misc_feature (49): Xaa equals any of the naturally occurring L-amino acids
  misc_feature (50): Xaa equals any of the naturally occurring L-amino acids
  misc_feature (51): Xaa equals any of the naturally occurring L-amino acids
  misc_feature (85): Xaa equals any of the naturally occurring L-amino acids
PPWTLPSGLAFGGRVERGMICASWSLLGYWSYFHWSCCSSVLIXINSFXXXEFWSLAVFVPPLCQWIIRTTPFVAVSQVFSEVVXPCLGIPGLFHVMSDHSSNKY

SEQ ID NO: 384 - protein, 39 aa, Homo sapiens
IRHEVKRSPKGRSCAILICYLNFMRSFKISVSTICWNIR

SEQ ID NO: 385 - protein, 65 aa, Homo sapiens
VKSERNCRNTYKHMLIFFKETVQLFSLVENFILPKAVMYQSPTCFTSSASLATNQSSILAVLLAL

SEQ ID NO: 386 - protein, 41 aa, Homo sapiens
DPWIPHREIFYFFTLRPAPDVSKHLIYFSQINGPREKNIYI

SEQ ID NO: 387 - protein, 86 aa, Homo sapiens
LSSRFIFSGRLTHDLCPVVCIPEHLLVFQMQGTKLTSRVWLDLGVNTGPVPHRREVRSTFVSQGRFLIDLPSCVDVFAMCVKCMCC

SEQ ID NO: 388 - protein, 65 aa, Homo sapiens
  misc_feature (6): Xaa equals any of the naturally occurring L-amino acids
  misc_feature (27): Xaa equals any of the naturally occurring L-amino acids
TASIQXLCRIKRLVEGLMWLATMKQKXGHSVTNIISFSFSENASLISFISSLKASHITLVPTKLL

SEQ ID NO: 389 - protein, 47 aa, Homo sapiens
  misc_feature (42): Xaa equals any of the naturally occurring L-amino acids
SFVNLFVKGVHFLWTYVYISLCNIKQMVISIFSSFKFKIIPXARHHR

SEQ ID NO: 390 - protein, 178 aa, Homo sapiens
  misc_feature (25): Xaa equals any of the naturally occurring L-amino acids
  misc_feature (65): Xaa equals any of the naturally occurring L-amino acids
  misc_feature (90): Xaa equals any of the naturally occurring L-amino acids
  misc_feature (124): Xaa equals any of the naturally occurring L-amino acids
  misc_feature (163): Xaa equals any of the naturally occurring L-amino acids
PLPALQLWARDLPLAPVPTSGAKPXLSQCGQWHQSLQYMRTAGTRPWRVFAGAGCGGSTARRARXTGLPWWGSILLSTVALRGAVTLPLXVTTHYILAKVENLQPEIKTIARHLNQEVAVRANXLGWSKRDARLTYLKNMRRLISELYVRDNCHPFKATVPSXDVSYYFGGGEDFRPL

SEQ ID NO: 391 - protein, 56 aa, Homo sapiens
  misc_feature (4): Xaa equals any of the naturally occurring L-amino acids
  misc_feature (33): Xaa equals any of the naturally occurring L-amino acids
  misc_feature (39): Xaa equals any of the naturally occurring L-amino acids
  misc_feature (40): Xaa equals any of the naturally occurring L-amino acids
  misc_feature (49): Xaa equals any of the naturally occurring L-amino acids
EFKXSLGNIVRSHPYRKIKKLAGCRGTHLFVSXTWEAVXXSPGGSSLQXTALILRH

SEQ ID NO: 392 - protein, 59 aa, Homo sapiens
FSSVFLLYLFVTFLYKEICKSLCLFELFERVFLHFKSIIKMQIVFPSFLFIYVLIFMGF

SEQ ID NO: 393 - protein, 87 aa, Homo sapiens
HERGPAPLLPSLLAPMPPSESWGDAATALFHGCHEQLTGLPRASPQHTEVTTLKGLIGSFSRSSFPFRRNGRDLPMASFQPLNRPAP

SEQ ID NO: 394 - protein, 154 aa, Homo sapiens
  misc_feature (8): Xaa equals any of the naturally occurring L-amino acids
  misc_feature (107): Xaa equals any of the naturally occurring L-amino acids
  misc_feature (116): Xaa equals any of the naturally occurring L-amino acids
TVSGLAEXLSLHLRSNSLRTIPVRIFQDCRNLELLDLGYNRIRSLARNVFAGMIRLKELHLEHNQFSKLNLALFPRLVSLQNLYLQWNKISVIGQTMSWTWSSLQRXDLSGNEIEXFSGPSVFQCVPNLQRLNLDSNKLTFIGQEILGFLDIPQ

SEQ ID NO: 395 - protein, 56 aa, Homo sapiens
  misc_feature (12): Xaa equals any of the naturally occurring L-amino acids
  misc_feature (21): Xaa equals any of the naturally occurring L-amino acids
  misc_feature (49): Xaa equals any of the naturally occurring L-amino acids
GAGNRVAAATAXERGMEKLRXVLSGQDDEEQGLTAQDSQINLLRSWMPXPLVSTPD

SEQ ID NO: 396 - protein, 53 aa, Homo sapiens
NTGRVSNQNCVHIQITGLGRSHRSKMCPWQMAPLIGYLRGCGALRAGLLERQR

SEQ ID NO: 397 - protein, 57 aa, Homo sapiens
SVFSSLSFNVSLIYFAYFPPEVFGFNFKLSFLRNTAMYNIDLCLISPFYQRKNVIFD

SEQ ID NO: 398 - protein, 84 aa, Homo sapiens
SQHFGRSRRADQLRSGVRDQPGQHGETPSLLKIQKLAGCGDTRLLSQLLGRLGQENCLNLRGGGCSEPKLCHCTPSWLTERDSI

SEQ ID NO: 399 - DNA, 2583 bp, Homo sapiens
cagctccttgacctgtttatggtttgggattggtctacttacctagctgattatgggcagccagcttctaagtaccttcgggtgaatccaaacacagcccttactcttttggagaagtgagtatattctgaaacttttttgtataacattttagcaccttttgattcagtgataaactgaagaactagagatttctgtcaaaaaagaaaagtctagatggagcttaaaagctcactctagtttaatgaccaaaaaataagcttttctttcttgcccttcagagttggtgtagtttcataagcaactgctgtttatattgatgtgaacaaaacatctttccttttgtatcctgaattgcaagcttaattgaccttagaaatatgtttactggggatgtgacaattggagctttctttaaaaaaaaaagtctataactcaggaaagaaggtattttgtcaaatgtgaccaggaattggaatgtttgccaccagtgttacctaaatcttagcattatggacttggattctttgcaggtagagaaatatgtgatttgaaaaaaaaaatacagtaaaaactgaggtaataggatttactgatgcatcttgtccaactaaacataaatttaggtgttaacttttccctctcattatgtgacagactttttctttactcaatcatatttcatttaaaatgtcactattgggagactctctgaatctgctgtgattctgggggctgctggataagaaaaataaaaaagtatcactattaaaattttcaattttaaattaaaattgttattattttcctatatttcaaaatatttgtggtgtatttgatttgaaaggacaagaggaagtgtttaaaataaatgtaaatttattttacaatgccatgaaatgcaactgaggcaaaaacatcgctattttacattttctaatgttattttcctttcaccttatcttgctatgaatatgattagcagagtctatacagggtatgtattttagcatactttgtggaataatattagaaaatagtatgatagtagtaaacctagcatattttagatgtacatactaatgcaaaaataccacttaacatagaatgtaaaataaagcttctaattttttgcatggttactatatctgtatgtttatttagtatctactttctttgaactatatttttcaagcataggattagtgtgggataattcagagcatgccaagatattttacttgtgacagcttagcttttaattttcttttaccaagcttcttcattcacatatgtttctaggatgaaggatactagcaaaaagaacaatatatttgctcagttcaggaagaatgatcgagacaaacagaagttgatagagacagtcgtgaaacagctgagaagtttggtgaatggtatgtcccagcacatgtagacctcacatggcttgcactcagtgacaccaaatccatgattcaatgttgatcttgagcaagtattggtcatgatacagtaatttgtttacagaatccaaaaatacaatagagaagatacatgagggcttaaacaagaaatagtaataaatatcatttgtatggatttttaaataatcgaatactattttatatatggaaaaaaatgaccattttttcacttttaggggaaaatgcaaaagtgtaatacataaattgtcacaaattatacatgaaattgattacaaatacatttgaaaaacatatgcctctactcataagtatttttttctatttagacttgaatgataatctgttttttgatcagtatatggctttggaattcaatcatgtctgatatggtagtatttcactaccattttctgacttttagcttttattttcacctcaatgtgatttaagcagaccaaaatttctaattctgctaattctgaaggggaaatagacaaatcttaaaagctgcctgaaatcaaacttgatttaactcagtaagaatgtgaattatttgttctacttgggtggtttaatttaatcgttctgaatatgaacaaaaggttttggattttctaaagatgcagtgttgtttctgttcatcagggttaatatttctaactatattgcttgtaggtgaccccattctggatttgtttggtttggtttggttccagttaaaagagaggacaggaactaaatggggctaaccacttcaggtgcagcttgtgcgagggtagatggttcctgcacacagaagttaccacaggggtcaggttactttcttcaaatagcagatttcagtactttatcctcattgtggaaacaagccaaaccaaatgaactctggaaaacctaaaacaaatgtacattttcctttgtgtatgtttccgtggtccaaatggcaatataaatccagtctttattctccctttgttgtatttatgctgaatcttccctttgccttttcaggatttaggcctgtaaaaaactatgcctgattctgaaaaaagggaataaagaattatatgtacatctctggattttgtgatgaaatattaaaaatattgagcaagttgttgaaaatgcattactattt

SEQ ID NO: 400 - DNA, 352 bp, Homo sapiens
cttggtgactcagcaatcaaactgttcattttgcacatgttttgtgtttgattcatttagtcactgagtcttcagtttctctgcctgctttttgccctgctgatggggaccagcctccaggtcagcacagcaggttgagcctagagaggcaatcacagtcccaggatgaacttttttttttgtccctgaaaggggcctttccaggagactccccaggggctgctgatatgctcttccaaggctttcctgattgtctgtccacccatacccaaggggaactgatgtttctatcctctcccataggccttttctaggctttttacccacttccagcctgtctcctaggggcctg

SEQ ID NO: 401 - DNA, 357 bp, Homo sapiens
tccacttctcccaaggcagcctttcttcacttgcctcagccacctaatctctgtcccaccagttttggggttttccttactccatgcgtttacctttccacacttgcacatgcacacagcaccgcatgaaaactcctaggaatctctccttcaacatggcttaatagtccttcttacctaatttcccagtgacctctgactcacagttacacaaaggaaatggacgtacacctggagcccagctgacttgggctaaggttggtcatggctctaggtttggtttaccttattggctagaagacagtagaggcccaggcactgtgtgctttatggatcgtctttctaatttacttgaac

SEQ ID NO: 402 - DNA, 395 bp, Homo sapiens
ctgcttctttccacatttcatatgggagaatggtcagttggatggaatgaaaataaacttttcttagacaagttacatgatagaaaacatcttgaatctagttaatagtcttagctccattaattgttagaattttgtcagagtagagcaggtagaattgagcagtattgaaacaaaacaaaatcttgggttattagctttggtcttgctattcacagtgtgtgaggctgaagaagatccccaacttctctagtcctcatgtcctaccttagtaaaatgagaaattgtaccagatactgccccaagttccttccagctaaaaccctgttattctaagcatcagagattgaataactcagactggccagtttaaatttttttagtagctactttaa

SEQ ID NO: 403 - DNA, 395 bp, Homo sapiens
ctgcttctttccacatttcatatgggagaatggtcagttggatggaatgaaaataaacttttcttagacaagttacatgatagaaaacatcttgaatctagttaatagtcttagctccattaattgttagaattttgtcagagtagagcaggtagaattgagcagtattgaaacaaaacaaaatcttgggttattagctttggtcttgctattcacagtgtgtgaggctggagaagatccccaacttctctagtcctcatgtcctaccttagtaaaatgagaaattgtaccagatactgccccaagttccttccagctaaaaccctgttattctaagcatcagagattgaataactcagactggccagtttaaatttttttagtagctactttaa

SEQ ID NO: 404 - DNA, 12025 bp, Homo sapiens
cagattgcaacagaggcaatagaaaatattaggacagttgtgtctttgacccaggaaagaaaatttgaatcaatgtatgttgaaaaattgtatggaccttacaggtaatgaaccatatgattcctgctaagaacctagtgctttcctaaggctgaattattgtcccaaaaagataataaaagctctgctgctccaaacaatgatatgactataagggtggccttttttcaacaattctgtcactgaaaataagtagctttttgatgtgactaggacacagaattatattttttacatcttatgcaaacaacaagaataggtctccaagacgtaaaagatatagagaattgcacagtctttggttatcagtgcaggcaacataaataacctatctgggtgacttaagacaaacattcctttaaggaattgctcaaacctttctttgcagtgtgtagactgaaccaaaagtgagacttgctattgggtatgttccagaggaaagtatttcatttgttctctgaatgaggaccagatccaacctactctgaagataaagaaacacagactatttcagtggtttatagttgagcaattcaagaaactcctaatggcaccatttgccactcatttccactgcagcctgattttataaatgagtatgttttaacacaaagttgaacacaacttagattacaattttgcagactggaacagtagttttgaacacttgcaaatttgaacagatatctttgaaagtctcaatttatgccatctcctcagttatgcacacttcatatgatactaaataacatgcagctacacctttgtgtccatttgttgtttgacataaaacatgtatgcaccattaatgatgacctgtttttaacttcaaggagggttaaggaagaatagaaaggtgaagctaattatgaacttggttataatttaaagattcaatagcttcacagaatgctcaagttttgtaacaccatgttcacagcacataagttaaaccatccaaattagtaatactttgaatttttccttttgccaaaaacaccctcatatttgagagtaactcaattatagttcttttggaggattcagaagccaataaagtatagcatgaagtcaaattagaaactgtacaaaataaattatatacaggggcggctggcaggatctagcttgggaaaggacttctggtgtatatctatgtaaacttcagggactcaacttttgtgaatctgaaacatgaattttaacctaacagagtacaattagttacaggaaacaacataatagtagtaaatcacattcagataattcaaacttaaattcagatcctgacattttaggtatttttgaaacaacaactatgcttaataggagttgaacattggagtcatcagatattaatatgtaataatatcagttatcatttgaggaaccactatgaactaggcactgtgctagacatttatatggtttttgtcaaaacaattctgcattacagtgattatttccatggtataaatgtttagagaagttatcatttacccaaactaatataactggaggtggaacttaaacccactcggccagacttagaagccgtgctctttccactacacagcgctaaaggaggctgaagagatggttacaagtatactgatttgcttttcaggaattctgtgcagaaggcacacatctatggaattacttttagtatctcacaagcatttatgtatttttcctatgccggttgttttcgatttggtgcatatctcattgtgaatggacatatgcgcttcagagatgttattctgtaagtagctttagaaatattaagattattctataataaggttttagtaggtttatgcaaaagtttagagtaggaaaaaaatgactcctgtgtccaaagatgaggtcagggatttaaatttaccacagtttccatcctggcaggcacagagatctgatcttgttaatactccaagtgcagtttcattttgcgggctacaattaagcttatgaaaatgatcagaaagcacagttttagttgtacatatgatcctggtcaggatgatgcaaattttctcattatagaatataggcagaaaaaatcataattagaaagttgctggtgaccatggactcaaaacagggttatatagcttactattatctacaaccaaaacatggcctggaaaacaagatgggaatacttgttggaagtctggcaaaggcactctctccctaaccaggcctgagatgagacagccctgccaacatttgcctctcagcctctcctttttccttggtttccaaggcaaactactggtctttctgtttgatgccttctttcataatgtgctcagcacattccattaggttgcaatctaggcttgaaagagggaagcaactctttttaagatcatttggtatgtttctgctctggtgggatgattttaaagcagtggtgaacagccatttttgaaacagggtcaagacaaaaaagcgaaagtgtgttaagagctgggttttttttttcatccaaaattaaaattaccatgaaaaaatgtatctatataatctttgtatcaggatcccagcaggaaacaaatggcacagcaaatgggttaattgatgagtttgctaaagggtctatttacaaaggcctggaaagtgttaaggtaagcagtacccaagaaggaagttaacaccccagcaatacccagctggaaactgctaccaccctaagcctaaaggcaagagaagggaaagatagccagaactcagcataggtgctttctgtggtctttgatggagggacagcaactgcacaagcaatctgacaagaaagaagccaaagaaacaaataccttggcctcactcccttccagcctccctatcctctgctgtgccttccattggccaaatcctatgaaaccagaggacaagaaaaccttttgattcagttcatgatagttggaatccccagacatggagtagggggatagaaggtagagatgggtaaaaagtgaggagtgattttgggggacaaatggaactagcagctggggattacaacttagagtacaactatttattgtataaaaaatattgagaacatttctgaaagtgaaaaccgttggaaagtcacattattcctgcttcctttcttttttaaaatcattgaaatgttaaattatggaaacctagaagacagctttaggcagtacagggaagctatgcagccacatgtgggttgttcatcactattttaaaacttagtttttggcaactcaccttttcgtcaagcatttaaaggaaagttttactatacctctcatcccagcccctaggtattaaaacccatttttaatatcttagctttagaaatttgaaggtgaaaacttaaagttctccattattagtagagaactcccactcctttctctggggtagtgctggtatcagaagtaaattgctttgtgaagttgtagatctcaggatctttagcccttcctaaaagttgtcataatcaatatccatctttaaagagcatataattagaaaatagaactttagtttaaggtgacttttttttccagagtgctgtcaatagttattttaacttttattttaggttcaggggtacatatgcatgttcgttaatacaggcaaactcatgtcatgggggtttggtgtacagaccatgtcatcacccagatactaagcataataactgatagcatagttattttaattgtaaataaaaagctatttctagtaaaagcttattttccctaataaaaattatttacagtgatgatgattatcatttgtgtggtagtacagaagaaaccacaaactggaagtcagggccggagctttatcagaaaaagcttacttggaactgatcaaggcccttacacactttgtgcttcaattccctcaactctaaaaagagtataaccagcaactaaaattagctgagctcacagatcagattcagttataagcctcttcttgaaagtaaaaacctttgggaagtcacagtagtcctaagaaattaggggctactatgcaaagggaagtcagaaagcaagtcgagaaaaggtaaaccctcaggaagtggatcttgcccctctcctagatttctctttttactagaattttatgaaaatgtatgtcggggagaaaggggatgattaaggagtaaagggaaaaaatactggtaagcactatacctttagactttcaaacatcatggagttaattataaaagctaatttttgaattcctctacttctgtctagggtgttttctgcaattgtatttggtgcagtggctctaggacatgccagttcatttgctccagactatgctaaagctaagctgtctgcagcccacttattcatgctgtttgaaagacaacctctgattgacagctacagtgaagaggagctgaagcctgtaagttctctgatgcctgatgatgcttgatcaatttttccctaaggtttgctgtctgctagattatagctacaggataagtttgtgatgattacaccaacatgtgcttcctttaatttgtaatatttatatagctaatatttgggcaacttgactgacatttaaaaattttataggtggtttcaaggatcctgaagtttagcacatcaaaataacaaaaaaaagggaaaaccagatatattagaactgaatagtttccacaaaaatttagtcatttctacataaaggtataattctgccatgttaatgcaattagtaatttgactttaatcactttttataatagttaagatgtaattggtaagaagggcagttcgttcacaatgagagtaataatcctgtgctttattatctataaaggtaacttaaactcacatctgagtgttctttgtatgacacaagatgctacacgttgtaatatacaagcagctgtgtaggtaaagaggctaggacttaacacagtctttccaggactttcccaggtatttcatgttctgataaaattgctgtgcccagtgagtgagataaagaaagtgaacttaagaaactgccagggtttgccatcagggctgcccactgaaactttgggtagaaactgttgctaaatttccaagcctttagagtcttttggacactggcttgattccagcttcagaataagcagttgggaaagctaaatgaatatcttaaagaaatcagaaactaagttagataacaactcatggtaatgactttttgtctaatctcacctatacccctatctctcaccttcatttcacaccataataacttgctatcaatattaactggcaccagaactataccaaatatgaattttatgtttctctactacagtctttggtaaagtttccttgaaataatatttcttattccaataattatcaggccaattataatagcaacatttaaacatttattcaggataaatttgaaggaaatataacatttaatgaagtcgtgttcaactatcccacccgagcaaacgtgccagtgcttcaggggctgagcctggaggtgaagaaaggccagacactagccctggtgggcagcagtggctgtgggaagagcacggtggtccagctcctggagcggttctacgaccccttggcggggacagtggtgagcacatttccttataacttgattgaaggctatattttaattggcccaaccaatattgtcataatggaaaatattggacaaatgtagacctagaatcctgtttgatacaatgaccacattctataaaccccaactggcaccatatctgggaaatatatggggacaataggacagaatgtctggaattcagtctagctcagaaaatactgaatataagtttaatttttaccctgtcatgggcctttccagtcagtctgattgttctaagcaaatactgacttactggcttataaaggtgaactacagactcctgcccaaattcaaagctgacttccaaaacagggtgctacctgcttattgcctccccaccgctttcagttttgctgccttctcttaccttgaattctcggctctcgaactttgactttgatcctcaacctccagccctttcatatttggcttttgtcattgattttctagcatgtagccccgtggctctcttccttgagtgaagaccaactcttactgataatgcttgtatctgccataaccttgggacagcacccatgacagagccctgggagcctgtccccattagacagtcaccaaagtgttaagccttgtttcttttattaatagttgttaagcctaaatcagccttgttaagcctaatttagttgtttctctctggaaatcttctgctttgctattatagctattctgcaggtaacataggcaaaccagctcaccaaaactctgtaaatatggtgtgctgatacgatggtgggaatttttttctttattgagatcaagactagctggacttgtgtctattcctttgcctgtaagctttaccttacacgaggctgtattttcaagtacatattacaacacttccctaggagcaccatgcctcctgcctatagcaagtaaaacaaaaacaaaaccatcactgccagcaaaaataatcctcccaaagacactgccctttgtaacttgttccttttccatgggattcttgtccttagtgctatcagagaggtgagggaaagttaaggctagtagttttcagggaaaagagaggtagaggtaggaccagagtcaaccagcttttggggccctgcttctgatcagctttttcactgctgtgcatgggggaaggggaaatcaagtcaaggtgaagggttaggattattctggggacagcagacctgagtgggacaccttgatgcaggcttctttaacgcagagtaggacacagatggctggaggagggcagacaaggacaaagagaagtgtgaaaaaagagggtcaaatgtgctaccattttgccagttagaccaagatagggatggcttaatcaccataaaaatcatcatgttggccatgctggcctcaatggtataagtcttggagggttgttgttttgaagctcctgacaccctcatgcaacgatcctccaaatggacaatctagtaactttttagtttttttttcttttttatacccttcttatagtttgtggactttggttttcagcttctcgatggtcaagaaacaaagaaactcaatgtccagtggctcagagctcaactcggaatcgtgtctcaggagcctatcctatttgactgcagcattgccgagaatattgcctatggagacaacagccgggttgtatcacaggatgaaattgtgagtgcagccaaagctgccaacatacatcctttcatcgagacgttaccccacgtaagttaaagagtagctgaaatcagaagagactactttttatcccccaaacaattaccaaagttatgccaacaaaatcttgtaacaaaatatgttgatttactaacattaacaacttggacaaggcacttcaggataccaagcttccttatttgtaaatgggaatacattatgcctacctcatacaaatgtagtgagaagctcaaaaccaccatacttcaggttacagactggtggttgagggctgcatttagactgcagtcatgtttggtttagccctatggtacttttaaaacaattatagtttttattttgagataattatggatttacatgtaattgtaaggaatacagagatcttatgtaccctttacctagtttctgccaatgacaatatcttgcaaaactagtatacagtatcacaagcaggatactgatattgatacactccactcatcttattcagacttcccttgttttacttgcattcatttgcatatggatttagttctgtgcagctgtattgcagatggggattcatagatccactaattaagaacactggccaggcacggtggctcacacctgtaatctcagcactttgggaggccaaggtgggtggattacgaggtcaggagattgagaccatcctggccaacatggtgaaaccctgtctctactaaaaacacaaaaatcaaccaggcgtcgtggtgggcacctgtagttgcagctactcaggaggctgaggcgggagaatcgcctgaacctgagaaacggaggttaaagtgatccaagatcacaccattgcactccagcctgggcgacagagtgagactccgactcaaaaaaaaaaaaaaaaagatacagaacattctcatctccataaagatccctcatattgcccttttagagccatgcatatatcccttcctcccaccctcattcctctcaaactctggcaaacatgaatctgttctccgtttgtataattttatattttaaaaatgttttataaaaatatatacagtatgtaaacttttgggattaacttttgtctttcagctaattccctgaagttgtgtgtattcataggcattgctttttattactgagtgatattccacagtgtggatgtaccacagtttaaccattcacctgttgaaggatagctgggttatttcctgtttctggctattgcaaataaagctgctgtaaatacttgtatacaggtttctgtatgaattcaagtttttatttctttgggataaacacccaggagtagaattgtggagcagtatggcaatttcatgtttagtttataagccactgctaaactgttttccagagtggccatcccattttacattcctaccagcaatgtgtaagtgatgtagtttctctgaatctttgccagcatttactgttgtcattagtttttatttttaccactctgataagagtgtagtgatacatcactgtggctttaatatgcatttcccaatggcaaatgatgttgaacatagttttttatatgcttatttaccatctatatatcctcttggtgaaatgtctccatgttgtttgcccatattctaattggatttttatcttttactgctgagttttcagaagttttttttgtttgtttgtttaacatattgtaattactgttggatatgtagtttgtaaatgttttctcccagtctgtagcttgtttattcatcctataagaaggtctttgcagagcaaaagttttacttttgatgaggtccaatttaccaattcttccttttatggattatgctttcagtgtcaagtctaagaactcgttgcctagccctaggcccaaaatattttctccatgtttttttctaaaagttttatagctttacattttaaatttcagtccatgatccatttttagttcactttaaacatgtgtagccctggaaggatggcttgaggtccctaaaagtgatggtagggacaattcattttatggcattcttccagcattcggggttccactgggttacactgacgtagagcttaattatttttgcttttattttctgctatagttagaaatcactcacacccacaaataaaattttaaaaccctttcattttggttagccttaccaacctttaatgcacattgacctgaatcaaatattggatttgactgtgaatagaaaaatttacagcttcagctcttaatataagtgaccactggaccttaggaaattaattcacatgatatacatcactgcataagccctgcaaactgaactgactcaatttacatctctattcatatgctctttctcagcctagaatgctctctcaaaatctagctccccaaacttctctaaaaagatttctttcatttatttccccttttttctccttctaccctgtctccataacaacttctatctccttcttctgatctttcatagtgtgctgtgtatactactacagtcctgtgttacataacaacattttggtcaatgacagactgcgtataccacagtggttcccataagattataatggaactgaaaaattcctattgcctagtgacatagctgtcataatatcatagtgcaacacaaaattcaagtatttgtggtgatgctggcataacaaagcgactgcactgccagttgtataagagtatagcacatactactatgtacagtgcataatacttgataatgacaacaaatgacttattgattcatatatccgttatagcatttgttattttagagtatcctcctcctattttaaagaaagttaattataagatagcctattgtagaataccattgagaattaaagtcactagttttctagtttgattttgaaaataaacactctgttaagttgaaacaacgttatagaaactgttattgactctaaatgtttttcttgtaaatagaactgtcaactgttaagcaacagttcattcaacatatttctcacttggttaacttgcagaaatatgaaacaagagtgggagataaggggactcagctctcaggaggtcaaaaacagaggattgctattgcccgagccctcatcagacaacctcaaatcctcctgttggatgaagctacatcagctctggatactgaaagtgaaaaggtgtgtgtggcctcccaacttatgtcttatttaatttatgaaatagaagggattttgctgtcaaccatgaaaaaaacacacacaagcacagggggaaaaacacagaacgttagatagtggtttttatttttatttttttgagacggggtctcgttgttgcctaggctgtagtgcagtggcgcaatccagctcactgcaacctctgcctccagggttcaagcgattctcttgcctcaacctcctgagtagctgggactacaggtgcctgccactatgcccagctaatttttgtatttttagtagagacagggtttcattatgttggccaggctggtctcgaatcctgaccttgtgatccgcctgcctcggcctcccaaagtgctgggattacaggcgtgagccaccttgcccggctgatagtggttattttgaagtaatggaatattttattctaaattttctaaaatgattatatattttataaagtaaagcattcaaaagaaaaaagctgcacaaattacatttttagcacattaggaatgaaaaactggaaaatactcaaaagggaactagttaaacagaagattagaaaatttaaatacttatgaatttttttacagcatgggaacccatttgtgttatatttaaaaagcagaacataactatgtagattaaatgttgattatacaaaatacacatgcataaagttcaaagattctaagatactagaaattaaaagttgattagaaaggtaacattttcaaatttacttgaatgttaaaactaatttatacaatttttgggataaggtgtctgtctgatttatcaataggttgtccaagaagccctggacaaagccagagaaggccgcacctgcattgtgattgctcaccgcctgtccaccatccagaatgcagacttaatagtggtgtttcagaatgggagagtcaaggagcatggcacgcatcagcagctgctggcacagaaaggcatctatttttcaatggtcagtgtccaggctgggacacagaacttatgaacttttgctacagtatattttaaaaataaattcaaattattctaccattttatctgacttgtaaaataagtttctggtttgtcatcataaaacataggtatgtctgtctcattctagatcaatttagaagacccaatttggggtttattacggcatttgaaatttgagagttagaagtgacacctgtcttgatgaagtattgaaacaacaggctagctctccctaagttattagaaacatccagaaaaagaacaaaattcaaggtaagtacaggtgtagaaatatagaagccacagacatagggaaatggtcttatggtcctgaatgggttgggtagacaggaaagtttgggaataattttcccaagtacaaaagaaaaataaattgttcaatagcctc

SEQ ID NO: 405 - DNA, 1668 bp, Homo sapiens
agaatctatcagaacaacatgtccaagacagctccaccaccctttatgagagacaacaccatatcagggcagaagtgtccatagtgaaagacctgatgattgggtgaatggaatgcctaccagcctcccagccttgggaggagctggcaaggagcatggcagccatctgggtgagccctgcccccctagaccagagatgccctccctgctaccacagagcagtcaggaagctgggttctgctagattctgggggtgtgtgctcagagcaaggccagggactctacactgcatatgaggtctcccctaaatttcctcagcattggagctttgggaggctttgtctggttttctttgcttgttttaattttgaactaacataaacgtgtattttatgccataggacatgagctggtttgatgaccataaaaacagtactggtgcactttctacaagacttgccacagatgctgcccaagtccaaggagtaggtagactgcactctacttgtagttttttacataacatggttttagataagcatgtagcatacccacacttgttaagatgcttccagctagaaatagcagaaagctcaaatcaaaactgctgtaaacaataagcagaagattaaacttcaaggttgattgacccactgccccctccagatttaatccagaatccaggttccctcattggctttggctttatcccaaggctgattccctgcagtcacaggatggctgctaatagtaattagaactacaggcttccttatttcccatccagtgaaagagagcacacacctctacctcaaccaccaaacaaaaaccctttgctgaaatctaatttgggctaatttgggtcacatgccccaccctgaaccactgtctccaggggatggtggtgttctgagtgcctacgtcccccacccctttagctgaggtgggttactttgcagctcactgcttccacacaacaggagaaggaggaatggatgcagagagctgactgcaatgttgctacagccacctttgttttctgagtggtacaacactaattcatccttatatgtgctttgtggtggatgtctcttaggacacgtaccctttgtaacaacagatggtctctttcccttttacacttttgaattaaatggtctttaaaattacccaggtacattggagttagtttcctctttgaacattgcatctatgaaaaaatacatgcacccccagtgcccatccacaaagcagagaagttgattacttggttctagaatgttggttcaggtgggcaggagaggaatgagagtgtaaaggcacaatgaagaaatgtctgcagagcctcatgagttaagcacaggtgttgtgggtttattgtaatgaaagtaagccaatgtagctcaggcatagaacccactcatcattctgaccaagaggctaaggctggagcgcatgcatttggagcttaaaactacagttgctttgtgctttttctctcccaggccacaggaaccaggttggctttaattgcacagaatatagctaaccttggaactggtattatcatatcatttatctacggttggcagttaaccctattgctattagcagttgttccaattattgctgtgtcaggaattgttgaaatgaaattgttggctggaa

SEQ ID NO: 406 - DNA, 12024 bp, Homo sapiens
cagattgcaacagaggcaatagaaaatattaggacagttgtgtctttgacccaggaaagaaaatttgaatcaatgtatgttgaaaaattgtatggaccttacaggtaatgaaccatatgattcctgctaagaacctagtgctttcctaaggctgaattattgtcccaaaaagataataaaagctctgctgctccaaacaatgatatgactataagggtggccttttttcaacaattctgtcactgaaaataagtagctttttgatgtgactaggacacagaattatattttttacatcttatgcaaacaacaagaataggtctccaagacgtaaaagatatagagaattgcacagtctttggttatcagtgcaggcaacataaataacctatctgggtgacttaagacaaacattcctttaaggaattgctcaaacctttctttgcagtgtgtagactgaaccaaaagtgagacttgctattgggtatgttccagaggaaagtatttcatttgttctctgaatgaggaccagatccaacctactctgaagataaagaaacacagactatttcagtggtttatagttgagcaattcaagaaactcctaatggcaccatttgccactcatttccactgcagcctgattttataaatgagtatgttttaacacaaagttgaacacaacttagattacaattttgcagactggaacagtagttttgaacacttgcaaatttgaacagatatctttgaaagtctcaatttatgccatctcctcagttatgcacacttcatatgatactaaataacatgcagctacacctttgtgtccatttgttgtttgacataaaacatgtatgcaccattaatgatgacctgtttttaacttcaaggagggttaaggaagaatagaaaggtgaagctaattatgaacttggttataatttaaagattcaatagcttcacagaatgctcaagttttgtaacaccatgttcacagcacataagttaaaccatccaaattagtaatactttgaatttttccttttgccaaaaacaccctcatatttgagagtaactcaattatagttcttttggaggattcagaagccaataaagtatagcatgaagtcaaattagaaactgtacaaaataaattatatacaggggcggctggcaggatctagcttgggaaaggacttctggtgtatatctatgtaaacttcagggactcaacttttgtgaatctgaaacatgaattttaacctaacagagtacaattagttacaggaaacaacataatagtagtaaatcacattcagataattcaaacttaaattcagatcctgacattttaggtatttttgaaacaacaactatgcttaataggagttgaacattggagtcatcagatattaatatgtaataatatcagttatcatttgaggaaccactatgaactaggcactgtgctagacatttatatggtttttgtcaaaacaattctgcattacagtgattatttccatggtataaatgtttagagaagttatcatttacccaaactaatataactggaggtggaacttaaacccactcggccagacttagaagccgtgctctttccactacacagcgctaaaggaggctgaagagatggttacaagtatactgatttgcttttcaggaattctgtgcagaaggcacacatctatggaattacttttagtatctcacaagcatttatgtatttttcctatgccggttgttttcgatttggtgcatatctcattgtgaatggacatatgcgcttcagagatgttattctgtaagtagctttagaaatattaagattattctataataaggttttagtaggtttatgcaaaagtttagagtaggaaaaaaatgactcctgtgtccaaagatgaggtcagggatttaaatttaccacagtttccatcctggcaggcacagagatctgatcttgttaatactccaagtgcagtttcattttgcgggctacaattaagcttatgaaaatgatcagaaagcacagttttagttgtacatatgatcctggtcaggatgatgcaaattttctcattatagaatataggcagaaaaaatcataattagaaagttgctggtgaccatggactcaaaacagggttatatagcttactattatctacaaccaaaacatggcctggaaaacaagatgggaatacttgttggaagtctggcaaaggcactctctccctaaccaggcctgagatgagacagccctgccaacatttgcctctcagcctctcctttttccttggtttccaaggcaaactactggtctttctgtttgatgccttctttcataatgtgctcagcacattccattaggttgcaatctgggcttgaaagagggaagcaactctttttaagatcatttggtatgtttctgctctggtgggatgattttaaagcagtggtgaacagccatttttgaaacagggtcaagacaaaaaagcgaaagtgtgttaagagctgggttttttttttcatccaaaattaaaattaccatgaaaaaatgtatctatataatctttgtatcaggatcccagcaggaaacaaatggcacagcaaatgggttaattgatgagtttgctaaagggtctatttacaaaggcctggaaagtgttaaggtaagcagtacccaagaaggaagttaacaccccagcaatacccagctggaaactgctaccaccctaagcctaaaggcaagagaagggaaagatagccagaactcagcataggtgctttctgtggtctttgatggagggacagcaactgcacaagcaatctgacaagaaagaagccaaagaaacaaataccttggcctcactcccttccagcctccctatcctctgctgtgccttccattggccaaatcctatgaaaccagaggacaagaaaaccttttgattcagttcatgatagttggaatccccagacatggagtagggggatagaaggtagagatgggtaaaaagtgaggagtgattttgggggacaaatggaactagcagctggggattacaacttagagtacaactatttattgtataaaaaatattgagaacatttctgaaagtgaaaaccgttggaaagtcacattattcctgcttcctttcttttttaaaatcattgaaatgttaaattatggaaacctagaagacagctttaggcagtacagggaagctatgcagccacatgtgggttgttcatcactattttaaaacttagtttttggcaactcaccttttcgtcaagcatttaaaggaaagttttactatacctctcatcccagcccctaggtattaaaacccatttttaatatcttagctttagaaatttgaaggtgaaaacttaaagttctccattattagtagagaactcccactcctttctctggggtagtgctggtatcagaagtaaattgctttgtgaagttgtagatctcaggatctttagcccttcctaaaagttgtcataatcaatatccatctttaaagagcatataattagaaaatagaactttagtttaaggtgacttttttttccagagtgctgtcaatagttattttaacttttattttaggttcaggggtacatatgcatgttcgttaatacaggcaaactcatgtcatgggggtttggtgtacagaccatgtcatcacccagatactaagcataataactgatagcatagttattttaattgtaaataaaaagctatttctagtaaaagcttattttccctaataaaaattatttacagtgatgatgattatcatttgtgtggtagtacagaagaaaccacaaactggaagtcagggccagagctttatcagaaaaagcttacttggaactgatcaaggcccttacacactttgtgcttcaattccctcaactctaaaaagagtataaccagcaactaaaattagctgagctcacagatcagattcagttataagcctcttcttgaaagtaaaaacctttgggaagtcacagtagtcctaagaaattaggggctactatgcaaagggaagtcagaaagcaagtcgagaaaaggtaaaccctcaggaagtggatcttgcccctctcctagatttctcttgttactagaattttatgaaaatgtatgtcggggagaaaggggatgattaaggagtaaagggaaaaaatactggtaagcactatacctttagactttcaaacatcatggagttaattataaaagctaatttttgaattcctctacttctgtctagggtgttttctgcaattgtatttggtgcagtggctctaggacatgccagttcatttgctccagactatgctaaagctaagctgtctgcagcccacttattcatgctgtttgaaagacaacctctgattgacagctacagtgaagaggggctgaagcctgtaagttctctgatgcctgatgatgcttgatcaatttttccctaaggtttgctgtctgctagattatagctacaggataagtttgtgatgattacaccaacatgtgtttcatttaatttgtaatatttatatagctaatatttgggcaacttgactgacatttaaaaattttataggtggtttcaaggatcctgaagtttagcacatcaaaataaaaaaaaaagggaaaaccagatatattagaactgaatagtttccacaaaaatttagtcatttctacataaaggtataattctgccatgttaatgcaattagtaatttgactttaatcactttttataatagttaagatgtaattggtaagaagggcagttcgttcacaatgagagtaataatcctgtgctttattatctataaaggtaacttaaactcacatctgagtgttctttgtatgacacaagatgctacacgttgtaatatacaagcagctgtgtaggtaaagaggctaggacttaacacagtctttccaggactttcccaggtatttcatgttctgataaaattgctgtgcccagtgagtgagataaagaaagtgaacttaagaaactgccagggtttgccatcagggctgcccactgaaactttgggtagaaactgttgctaaatttccaagcctttagagtcttttggacactggcttgattccagcttcagaataagcagttgggaaagctaaatgaatatcttaaagaaatcagaaactaagttagataacaactcatggtaatgactttttgtctaatctcacctatacccctatctctcaccttcatttcacaccataataacttgctatcaatattaactggcaccagaactataccaaatatgaattttatgtttctctactacagtctttggtaaagtttccttgaaataatatttcttattccaataattatcaggccaattataatagcaacatttaaacatttattcaggataaatttgaaggaaatataacatttaatgaagtcgtgttcaactatcccacccgagcaaacgtgccagtgcttcaggggctgagcctggaggtgaagaaaggccagacactagccctggtgggcagcagtggctgtgggaagagcacggtggtccagctcctggagcggttctacgaccccttggcggggacagtggtgagcacatttccttataacttgattgaaggctatattttaattggcccaaccaatattgtcataatggaaaatattggacaaatgtagacctagaatcctgtttgatacaatgaccacattctataaaccccaactggcaccatatctgggaaatatatggggacaataggacagaatgtctggaattcagtctagctcagaaaatactgaatataagtttaatttttaccctgtcatgggcctttccagtcagtctgattgttctaagcaaatactgacttactggcttataaaggtgaactacagactcctgcccaaattcaaagctgacttccaaaacagggtgctacctgcttattgcctccccaccgctttcagttttgctgccttctcttaccttgaattctcggctctcgaactttgactttgatcctcaacctccagccctttcatatttggcttttgtcattgattttctagcatgtagccccgtggctctcttccttgagtgaagaccaactcttactgataatgcttgtatctgccataaccttgggacagcacccatgacagagccctgggagcctgtccccattagacagtcaccaaagtgttaagccttgtttcttttattaatagttgttaagcctaaatcagccttgttaagcctaatttagttgtttctctctggaaatcttctgctttgctattatagctattctgcaggtaacataggcaaaccagctcaccaaaactctgtaaatatggtgtgctgatacgatggtgggaatttttttctttattgagatcaagactagctggacttgtgtctattcctttgcctgtaagctttaccttacacgaggctgtattttcaagtacatattacaacacttccctaggagcaccatgcctcctgcctatagcaagtaaaacaaaaacaaaaccatcactgccagcaaaaataatcctcccaaagacactgccctttgtaacttgttccttttccatgggattcttgtccttagtgctatcagagaggtgagggaaagttaaggctagtagttttcagggaaaagagaggtagaggtaggaccagagtcaaccagcttttggggccctgcttctgatcagctttttcactgctgtgcatgggggaaggggaaatcaagtcaaggtgaagggttaggattattctggggacagcagacctgagtgggacaccttgatgcaggcttctttaacgcagagtaggacacagatggctggaggagggcagacaaggacaaagagaagtgtgaaaaaagagggtcaaatgtgctaccattttgccagttagaccaagatagggatggcttaatcaccataaaaatcatcatgttggccatgctggcctcaatggtataagtcttggagggttgttgttttgaagctgctgacaccctcatgcaacgatcctccaaatggacaatctagtaactttttagtttttttttcttttttatacccttcttatagtttgtggactttggttttcagcttctcgatggtcaagaagcaaagaaactcaatgtccagtggctcagagctcaactcggaatcgtgtctcaggagcctatcctatttgactgcagcattgccgagaatattgcctatggagacaacagccgggttgtatcacaggatgaaattgtgagtgcagccaaagctgccaacatacatcctttcatcgagacgttaccccacgtaagttaaagagtagctgaaatcagaagagactactttttatcccccaaacaattaccaaagttatgccaacaaaatcttgtaacaaaatatgttgatttactaacattaacaacttggacaaggcacttcaggataccaagcttccttatttgtaaatgggaatacattatgcctacctcatacaaatgtagtgagaagctcaaaaccaccatacttcaggttacagactggtggttgagggctgcatttagactgcagtcatgtttggtttagccctatggtacttttaaaacaattatagtttttattttgagataattatggatttacatgtaattgtaaggaatacagagatcttatgtaccctttacctagtttctgccaatgacaatatcttgcaaaactagtatacagtatcacaagcaggatactgatattgatacactccactcatcttattcagacttcccttgttttacttgcattcatttgcatatggatttagttctgtgcagctgtattgcagatggggattcatagatccactaattaagaacactggccaggcacggtggctcacacctgtaatctcagcactttgggaggccaaggtgggtggattacgaggtcaggagattgagaccatcctggccaacatggtgaaaccctgtctctactaaaaacacaaaaatcaaccaggcgtcgtggtgggcacctgtagttgcagctactcaggaggctgaggcgggagaatcgcctgaacctgagaaacggaggttaaagtgatccaagatcacaccattgcactccagcctgggcgacagagtgagactccgtctcaaaaaaaaaaaaaaaaagatacagaacattctcatctccataaagatccctcatattgcccttttagagccatgcatatatcccttcctcccaccctcattcctctcaaactctggcaaacatgaatctgttctccgtttgtataattttatattttaaaaatgttttataaaaatatatacagtatgtaaacttttgggattaacttttgtctttcagctaattccctgaagttgtgtgtattcataggcattgctttttattactgagtgatattccacagtgtggatgtaccacagtttaaccattcacctgttgaaggatagctgggttatttcctgtttctggctattgcaaataaagctgctgtaaatacttgtatacaggtttctgtatgaattcaagtttttatttctttgggataaacacccaggagtagaattgtggagcagtatggcaatttcatgtttagtttataagccactgctaaactgttttccagagtggccatcccattttacattcctaccagcaatgtgtaagtgatgtagtttctctgaatctttgccagcatttactgttgtcattagtttttatttttaccactctgataagagtgtagtgatacatcactgtggctttaatatgcatttcccaatggcaaatgatgttgaacatagttttttatatgcttatttaccatctatatatcctcttggtgaaatgtctccatgttgtttgcccatattctaattggatttttatcttttactgctgagttttcagaagttttttttgtttgtttgtttaacatattgtaattactgttggatatgtagtttgtaaatgttttctcccagtctgtagcttgtttattcatcctataagaaggtctttgcagagcaaaagttttacttttgatgaggtccaatttaccaattcttccttttatggattatgctttcagtgtcaagtctaagaactcgttgcctagccctaggcccaaaatattttctccatgtttttttctaaaagttttatagctttacattttaaatttcagtccatgatccatttttagttcactttaaacatgtgtagccctggaaggatggcttgaggtccctaaaagtgatggtagggacaattcattttatggcattcttccagcattcggggttccactgggttacactgacgtagagcttaattatttttgcttttattttctgctatagttagaaatcactcacacccacaaataaaattttaaaaccctttcattttggttagccttaccaacctttaatgcacattgacctgaatcaaatattggatttgactgtgaatagaaaaatttacagcttcagctcttaatataagtgaccactggaccttaggaaattaattcacatgatatacatcactgcataagccctgcaaactgaactgactcaatttacatctctattcatatgctctttctcagcctagaatgctctctcaaaatctagctccccaaacttctctaaaaagatttctttcatttatttccccttttttctccttctaccctgtctccataacaacttctatctccttcttctgatctttcatagtgtgctgtgtatactactacagtcctgtgttacataacaacattttggtcaatgacagactgcgtataccacagtggttcccataagattataatggaactgaaaaattcctattgcctagtgacatagctgtcataatatcatagtgcaacacaaaattcaagtatttgtggtgatgctggcataacaaagcgactgcactgccagttgtataagagtatagcacatactactatgtacagtgcataatacttgataatgacaacaaatgacttattgattcatatatccgttatagcatttgttattttagagtatcctcctcctattttaaagaaagttaattataagatagcctattgtagaataccattgagaattaaagtcactagttttctagtttgattttgaaaataaacactctgttaagttgaaacaacgttatagaaactgttattgactctaaatgtttttcttgtaaatagaactgtcaactgttaagcaacagttcattcaacatatttataatttggttaacttgcagaaatatgaaacaagagtgggagataaggggactcagctctcaggaggtcaaaaacagaggattgctattgcccgagccctcatcagacaacctcaaatcctcctgttggatgaagctacatcagctctggatactgaaagtgaaaaggtgtgtgtggcctcccaacttatgtcttatttaatttatgaaatagaagggattttgctgtcaaccatgaaaaaaacacacacaagcacagggggaaaaacacagaacgttagatagtggtttttatttttatttttttgagacggggtctcgttgttgcctaggctgtagtgcagtggcgcaatccagctcactgcaacctctgcctccagggttcaagcgattctcttgcctcaacctcctgagtagctgggactacaggtgcctgccactatgcccagctaatttttgtatttttagtagagacagggtttcattatgttggccaggctggtctcgaatcctgaccttgtgatccgcctgcctcggcctcccaaagtgctgggattacaggcgtgagccaccttgcccggctgatagtggttattttgaagtaatggaatattttattctaaattttctaaaatgattatatattttataaagtaaagcattcaaaagaaaaaagctgcacaaattacatttttagcacattaggaatgaaaaactggaaaatactcaaaagggaactagttaaacagaagattagaaaatttaaatacttatgaatttttttacagcatgggaacccatttgtgttatatttaaaaagcagaacataactatgtagattaaatgttgattatacaaaatacacatgcataaagttcaaagattctaagatactagaaattaaaagttgattagaaaggtaacattttcaaatttacttgaatgttaaaactaatttatacaatttttgggataaggtgtctgtctgatttatcaataggttgtccaagaagccctggacaaagccagagaaggccgcacctgcattgtgattgctcaccgcctgtccaccatccagaatgcagacttaatagtggtgtttcagaatgggagagtcaaggagcatggcacgcatcagcagctgctggcacagaaaggcatctatttttcaatggtcagtgtccaggctgggacacagaacttatgaacttttgctacagtatattttaaaaataaattcaaattattctaccattttatctgacttgtaaaataagtttctggtttgtcatcataaaacataggtatgtctgtctcattctagatcaatttagaagacccaatttggggtttattacggcatttgaaatttgagagttagaagtgacacctgtcttgatgaagtattgaaacaacaggctagctctccctaagttattagaaacatccagaaaaagaacaaaattcaaggtaagtacaggtgtagaaatatagaagccacagacatagggaaatggtcttatggtcctgaatgggttgggtagacaggaaagtttgggaataattttcccaagtacaaaagaaaaataaattgttcaatagcctc

SEQ ID NO: 407 - DNA, 1669 bp, Homo sapiens
agaatctatcagaacaacatgtccaagacagctccaccaccctttatgagagacaacaccatatcagggcagaagtgtccatagtgaaagacctgatgattgggtgaatggaatgcctaccagcctcccagccttgggaggagctggcaaggagcatggcagccatctgggtgagccctgcccccctagaccagagatgccctccctgctaccacagagcagtcaggaagctgggttctgctagattctgggggtgtgtgctcagagcaaggccagggactctacactgcatatgaggtctcccctaaatttcctcagcattggagctttgggaggctttgtctggttttctttgcttgttttaattttgaactaacataaacgtgtattttatgccataggacatgagctggtttgatgaccataaaaacagtactggtgcactttctacaagacttgccacagatgctgcccaagtccaaggagtaggtagactgcactctacttgtagttttttacataacatggttttagataagcatgtagcatacccacacttgttaagatgcttccagctagaaatagcagaaagctcaaatcaaaactgctgtaaacaataagcagaagattaaacttcaaggttgattgacccactgccccctccagatttaatccagaatccaggttccctcattggctttggctttatcccaaggctgattccctgcagtcacaggatggctgctaatagtaattagaactacaggcttccttatttcccatccagtgaaagagagcacacacctctacctcaaccaccaaacaaaaaccctttgctgaaatctaatttgggctaatttgggtcacatgccccaccctgaaccactgtctccaggggatggtggtgttctgagtggcctacgtcccccacccctttagctgaggtgggttactttgcagctcactgcttccacacaacaggagaaggaggaatggatgcagagagctgactgcaatgttgctacagccacctttgttttctgagtggtacaacactaattcatccttatatgtgctttgtggtggatgtctcttaggacacgtaccctttgtaacaacagatggtctctttcccttttacacttttgaattaaatggtctttaaaattacccaggtacattggagttagtttcctctttgaacattgcatctatgaaaaaatacatgcacccccagtgcccatccacaaagcagagaagttgattacttggttctagaatgttggttcaggtgggcaggagaggaatgagagtgtaaaggcacaatgaagaaatgtctgcagagcctcatgagttaagcacaggtgttgtgggtttattgtaatgaaagtaagccaatgtagctcaggcatagaacccactcatcattctgaccaagaggctaaggctggagcgcatgcatttggagcttaaaactacagttgctttgtgctttttctctcccaggccacaggaaccaggttggctttaattgcacagaatatagctaaccttggaactggtattatcatatcatttatctacggttggcagttaaccctattgctattagcagttgttccaattattgctgtgtcaggaattgttgaaatgaaattgttggctggaa

SEQ ID NO: 408 - DNA, 32150 bp, Homo sapiens
ctgcctcaaaaaaaaaaaacaacaaaactttaatgttgtaaaagactcatccaatccaaattgaatttttgttttctttgtattttacaggttttgggtctagtaatactggttctgtgtttggtcaagcagccagtactggtggaatagtctttggccaggtaaatatgcatttgtcttcattcacgtcaacatgtatcaaacccattcagttttcttcactgtaatgtagtcagttcgtgttgtatatctaaatccagcaaatatagccctgtgtggttcttaagctgtactcccttcagctgccttggaggtgcagaagtctcagcctctgattaaagaggatcactagaattttgatcctccttccacagtcttctgagaaagtattttgaaagcacattgcctgattccttttttctttagacacaggatcttgctgtgttgcccaggctgtagtacagtggcacaatcacagctgactctagccataaactcctgggctcaagcaatcctcctgcctcagcctccccagtagtttggattgtaggcatgcaccataacactcaactaattttttatttttgtagagacacagtctcgctatgttgtccaggctggtctcaaactgctggcctcaaacgatcctccacgcctgaccacattgcatgatttctatcagtcccctgcctgttaggccaagggttgacaaacttcagtctgtgggctaaatacactgtttggcttttggggggtttgttgttgtttaacttcttaatctaagaatggtgtttgtgtgtgtgtgtctatatgtatacatatatgtgtgtacacacacacacacacatatatatatttttgtttgtttgtttgtttttgtttttggaggcagagtctaactctgttgcccaggctggaggacaatggcacaatcttggctcactgcaacctccgcctcccaggctcaagtcatcctcccacctcagtttcccaagtagctgggactataggtttgtgccaccacacccagctatttttttttttctttttgtgtttttggttgagacggggttttgccacgttgcccaggctggtctggtctcttaactcctgagctcagggtgatctgcccgccttggcctctcaaagtgctgggattacaggcgtgagccactgtgcctggccagtttttatatttttaagtggttgtttaaaaagaaaaaagaggaagaagatttggcaacatatatatcccctctgctacgctatatgtagcccagagactccttttggtgaactgagctgtttgattttatgtagctagcagttatctatgtgccaggcataattttaagtcttttatttatttatttatttatatttatttatttacttatttttttttttgagaccgagtgtcgctcttttgcccaggccggactgcagtggtgctatctcggctcactgcaagctctgcctcccaggttcacgccattctcctgcctcagcctcccgagtagctgggactacaggtgcccaccaccgcacccagctaattttttgtatttttagtagagacggggtttcgctgtgttagccaggatggtctcgatctcctgatctcgtgatccgcccacctcagcctcccaaagtgctgggattacaggcgtgagccactgtacccagccaattttaagtcttttatacaaattaactcatgtaagcatcacagcacctccataagataggtgcgattattatcgccatttaagagatgaggacaccgaaggcccagagaggttaaattgactgttacatcagacaccggctgcatttagatcatttagatcatagtaacctcctaaggagcccttatgaagaaagataccctaatttatcagaaaggattgtgactttctgaaggtagaatttgtattagtccggcagttaataaagtggtaggcataatatatgtttcttatacatcttcaggaagaaattttctttatcatctctgttttcctttgaagataggctctgtcctagtcagtgatctttcttaagagagaagtgaaacttctgatttccagtttctggtagtagaggactaagtcattcaagggaaccaagttccctactgaaaactactaaaaaatgctagataaaacataaaaaccttgtctttaaaagcaccaataaactaacaaggtattttaccaagccaaaaggaaaatggggacctagagaagtggagcccagaagccagttgtgccctgacagcatttactaatctgagaaaatgtgaattttctatttaataaccccaaaggtaaagggacaaaaatcaccaactaagatatgcacaaagtggggagtctaaaagagacccttcagctgggactccatgttgacaggtctcagcccctgactagactgatatggttccagagtgatgctgcctccaggtgtctggcagaggcagcgcaggcccaccctgaaggaaaggaactttacttagccttcgaattactcttacaagtaatttctgtccctcaatgagacacacaaggaaaccaggaactatgagcaagagccagaataagcgtcagaaatcacctttgcacagactacctaaactgtaaatcagctggggcttacagagtttagaagaaatcaaagacaaacttgaaaataccagtaaggaatataaaatcttaagaagtgtcatagcaaatttgaagaagaaccaaatagaatttctaggaaaatgtaatgattaaactcaggtgtaaactcagtggctgtatttggagcagattagacccactgaaaggagcagtggtgctctagaacagaatgtggtagtcagcgtttccagctttgagggctatcgatagcctctgtcagaagcacttaacgctgccattgtagtgcagaagcagccgtagacaatatgtaaacgaatgcgcatgattgtgttcagtaaagctttgtttacaaaaacaggcagtgagctggatttggcccctgcgctgtagtttgctgacctaactagaaggtaggttaaggtgagttacctggaatgcatcacagagagcgaaatgaaagatacaaaagagaaaaaatcctgtaggagaaaatccaacacacatttaatcagagtcccagaaggagaagagagaaagacagaaccttccaaaactaatcgataatagtaatccacagattcagaagcccaacaagtgccaaacgagaatgcataaaaggaaactgattctaagacctgtcctagtgatactgaagaacaccaaagatgaaatattaaaagcaactagagaaaaaagacagattatcttctagggtgccataggcagactgacagcagacttttcagcaatgaccatgaaagccagaactggccacctagcatttctaaatccagcaaaaaaatatctataaagaatgaagagaaatcaagactttttttcagataagcaaatactgaaataatttatgtctagcagacctgactccagtctgggcgacagagcaagactccatctcaaaaaacaaaagaaattctaagagatactgtttggaaagaaggaaaatttgacctcactaaaattatggccctcttaattttagggtaaaacaagccattaaataggaaaattgtagcctatgtaaccaacagtgtaattgtattcagaatatgtaaagctttcctatagttcaaaaagaaagacagctatacccaaattaaattaaaaggctgacagtaccaagtattggtgaggaagaagagcaactgggaactcatattgctagtgagagtgtaaattcatattaaccactttggaaaaccatttggcagtatcaaaactaatatacaaaatccctcttggcccagcaaatctaccctgaatatgtaaccaacagaaatgagtgcctttgttcaccaaaagatattgataagaatgttcacagcagaatattcttaatagctaaacacaggaaacagcccaaatgcttatgagctaaagaatgcataaataaattgtggtatattcatacagcccaatactacagagaaataaaatgtactgctcctatagctggcctaggtttgtttttttgttgttgttttgtttttgagacggagccttactctgttgcccaggctggagtgtggtggcatggtcttggctcactgcaacctctgcctgctggattcaacctcagcctcccgagcagctgggattataggtgcccaccaccacgcccagctaatttttgtatttttagtagagacagggtttcgccatgttggccaggctggccttgaactcctgaactcaggtgatctgcccacctcgacttcccaaagtgctgggattacagtcatgagccaccatgcccagcctaaatttgttttttaaagaaattcgtgcacgtatgtatcaggatacaagtgtattcatagcaacattgttataatagcttacaactagaagcagcccaaatgtttgtcagcattcatatgggtaggtaaatttacattattccacatagaatttttttcttttttcttttttttttttttgagacagggttttactcctgtcgtcaaggctggagtgcagtgatgcgatctccactcactgcaacctttgcctcccaggctcaagtgattctcctgccttagctacccaagtagctgagactacaggtgcacacactgtgcctggctaattttttgtatttttttgtagagacggggtttcacatgttgcccaggctggtcttgaactcctgggcttaagcaatctgcctgcctcggcctcccaaagtgctgagattagagacatgagccactgtgcccaaccctcttttctttttttttgagacaggatctcactctgtcacccagggtggagtgcagtggcacagtcacaggtaactgcagccttgatctcctgggctcaagcagtcctcctatcagttctccagaatagctaggtccacaggtgcaccaccacgcccaactaattttttcagttttttgtagagatggggtctcaccgtattgtctaggctggtctgtaactcctggcccaagtgatcctcccacctggacctcccaaagtgctgatgagattacaggcatgagacaccatacctggtctcatagtagaatattatccagctatgaaaaggagcagatttcagctccatgtataactaacaagcacaatgttgagccaaagaaatagaaaacatcactgtgataaactccatattgttacttccccttccactccgtattcttccaccacggaaattatgtatgcaattggaagggccaaagattgaaatcaaggttttttctatgatggcaggggccttattgtttttattgattgctgtatctccaatgcttaggactatgtctggcacatgataggcattgtggaaatgaatgaactttcaggtagcagaagtatcctcagaaaactctaaagatgctaggcagattctggctaggatgtaaaagaatatagaaaaccttcactgccataataacaccaagaaaaatccagatgatgtagaagtcacacttactctggcagtattggaattatttactgctgtataacaaattgcctcaaaacctagtagcctgcaacagctacttatttattatagtcttggattctgtaggtcataacttcagatggacttagtagggatggcttgtcttcacagtatctgtgatctcagctggaagaagggaagactggaggcaggagtcatctgaaggctcactctgatgtcagtggttggcttggctgttggctcagaccttagctggagctgttagctgaacacctacatttggcctatgtagcctgggcttcctcacaacgtggtggctaggttccaaggaggaacattccaagaaagaggaagagccatgctgaagctgtataaccttttatgacctatcctcagaagtcacagaacatcacttaggctgcatcctcttcatcaaggcactcacaaagtcccatccaggttcaagaggagatacagaggccgcctcttgctctagaagagcatatgtgactagaagtattgctgtgatcatctttggaaaatatctgtcataatgggaccattgaagagtggcagaaagccttgttgaactggtttccagagagtggagcccatcataggtgtgagcactgtggcacagcagctgctgggggcagatgccaggtctgggtttgagcaggtagtagagaggacttgccaaagactgagaaaatgtactggctggagaaggagctgttggcagtgatgggggcaagcaaaataaatgaccagtaattacatgaaaaggtgatcaagtagcattaaactaatgagggaaatgaaaatcaaaaccacaattagataagataccacttcacaccccctaggatggctatcatttaaaaagtaaaaaataaaaataaccagtgttagcaatgatacaaagaaattagaaccctcatacattgctgatgggaatgcaaaattgtgcagctactatagtttggtggtttctcaaaaagctaaatatagtacttctaccatatgacccagcaattctgctctggggtagaatacccaaaggaattgaaaaaaagggattcgaacaaatacttgtacatcaatgttcattgcagcattattcacagtagccaaaaggtggaaacaacccaagtgtcaaacagcagatgaatggataaacaaaatgtggtatatacattccatgggatatttttcagccataaaaaggagtgaagttcttggccgggtgcagtggctcacgcctgtaatcccagcactttgggaggctgaggcgggcggatcacgaggtcaggagatcgagaccatcctggctaacacagtgaaaccctgtctctattaaaaatacaaaaaattatccaggcgtggtggcgggtgcctgtagtcccagctactcgggaggctgaggcaggagaatggcatgaacccaggaggcagagcttgcagtgagccgagatcgcgccactgcactccagcctgggcgacagagcgagactccgtctcagaacaaaacaaaacaaaaacaaaaggaatgaagttctcggctgggcatggtggctcacacctttaatcccagcactttgggaggctgaggcaggcatatcatgagtcaagagatggagaccatcctggccaacatggtgacacaccgtctctactaaaaacaaaaattagctgggcatggtgaagctcgccggtagtcccagctacttgggaggctgaggcaggagaatcgcttgaacccaggaggcggaggttgcagtgagccgagatcacgccactgcactccagcctgggcgacagagtgagactccatctcaaaaaaataaataataaaaaggaatgaagttctcattcatgctacatatagataaactttgaaaaccatatgctaaggctgggcgcagtggcacacacacctgtgatcccagcactttgggaggctgggatgggcagattgcttgagctcaggagtttgagactagcctgggcaacatggcaaaattccatctctacaaaaaaaaagacccacaagttggctgggcgtggcagtgcatgcctgtagtcccaactactaaggaggctgaggtgggaggatcacttgagctcgggaggtcaaggctgctgcagtgagctatgttcctatcactgcactctggcctgggtgacaaagtgagaaccctgtctcagtcagtcaaatttatttatttatttagagacggagtcttgctctgtcgcccatgctggagtgcagtggcacagtctcagctcactgcaacctccgactcccaggttcaatcaattctcccacctcagcctctcaagtagtagctgggactacaggtgttcactgtcacacctggctactttttgtatttttagtagagttggagtttcaccatgttggccaggctggtctcgaactcctcaccttaggtgatctgcctgcctcggcctcccaaagtgctgggattacaggcgtgagccactacacctggcctcagtcagatataaaaattaaaaactcagattgggatctgaaagacttgtaagtgcaacaataatttattcagcatacatatcctccagctctcccccgctaatcctccccaactttgcaaagaaaaaggaactaaagcagcactaaaaagtagaaagaactcacagggtcttacattctcctgttttctggaactcttgtttgaaaggtgatacttcctcttgcctcccacctcagatacttacagaccaataacctaaaacctaagtggagactgttgggctaaccagaggtgagctcagtcttcttaaatctgtgactctgttccagatcaacccttagtgaaatctgaataattatttcctcactttaatcagacgaaatgggagctctcactctctaggaaaagcattaatgttcttcagtcaccactgttcttccataatacaaacatacagagcaaccaaaaaagagagtgacacccacaattaaatttttaaaatcagcaaaaaccaacctatagatgattcagatattggaactggagacagactttaactgtcatgttcatagggcttatgggaaaatagttgaaacagtggttgaataaggaatctcagcagagaaatggaagcttaaaaaaaccaatggaaaggccgggcacagtggctcacgcctgtaatgccagcactttgggaggccaaggcgggcggatcacgaggtcaggagttcaagaccagcctggccaacatagtgaaaccccatctctactaaaaatactaaaattagccggcatggtggcgcgcccctgtagtcccagctactcgggaggttgaggcaggagaaccacttgaacccaggaggcagaggttgtggtgagccgagatcacaccactgcactccagcctgggaaacagagcgagactccatctcaaaaaaaaaaacaaaaacgcaagtcgttatctgtatttgaagtttaaatctagtacgtgaaataaaaaacaaaataggcttaacagcagagtgaatactacaaaagaacagtgaactcgaagacgtatcaatagaaattatctaaaatgaaggtcagagagatggaaaaaaaaggatagagcatttctacgatctatgcaacaatatcaggcagtccaatatatgtgtaatcagagtcctagaagggtaggagacagaatgggtaggataaattcacaaaagaagtgcaaaacttatacaatgaatactataaaacattgttgaaattaatgacaacctaaataaatgaaaatacatcccatattcatggatcagaagactcaacattttgttaaaatggaatactcttagctagtaaattgtagaaccagtactgaaaccaaggtctgttcaaattaatttaatcattcatataggaattcatggtgagtaggacaggcaaaggtggctgtgttcatggagcctccattagatggagggagtcattctttaataaaacggtataatttcagatagtgttaagtactgtgaaataaagcatgatgtgataataattggggaagatggtttaggttagatggtcaggaaatgcctctctgaaaaagtctcataaatgtctctttttctttttacattttgttttcttgaattaggaccaaataaaggccacacattgagattgcttgctatgtctcttaagtctctttatgtataggttcctctttcatatctcgcttttgaatttttcctggtaattcagttgttgaacaaagctggtcatttgtcctgtggcgtttcccatgatctggtttctgactgcacagcttccaagtgaatgccatctgttgcgggaagtcagggaccccaaatggagggacctgctgaagccgtgacagaagaacataaattgtgaagatttcatggacatttattagttccccaaattaatacttttgtaatttcttacgcctgtctttactacaatctctgaacataaatcgtgaaaatgtcatggacgtttatcacttccctgatcagtactcttgtgatttcctatgcctgtctttactttaatctcttaatcccgtcatcttcataagctgaggatgtatgttgcctcaggaccctgtgatgattgcattatctgcacaaattgtggagcatgtgtgtttgaacaatatgaaatctgggcatccaaaaggaacaggatggctgcgattttcatggaacaagggagataaccattgggcctgactgcctgaggggctggacagaacagagtcatatttctcttcttacaaaaccgaataggagaaataacactgagttctttttctcagcaaggaacagccctgagaaagagaatgcattcctagggagaggtctctaaaatggccactctaggagtgtctgtcttacacggttgtagatgagggatgaaacaagccccagtctcctgtggcaccccaggcctcttaggattgggaaattcctgcctagtaaattttagtcagaccgattgtctgctctcaaaccctgtctcctgataagatgttatcactgataatgcatgcccagtgggacatgaaacttcatcagcaattctaatttcaccctggtcctgtgatctcgctctgccccatttgccttgtgatattttattgcccttgaagcatgtgatctctgtgacccacaccctattcatacaaccctccccttttgaaatccataataacttactggttttgtggctcagggggcatcacggaacctgccaacatgtgatgtctcccctggacacccagctttaaaatttctctcttttgtgttctttccctttatttctcagactggccgacacttagggaaaatagaacgtatgttgaaatatcgggggctggttccccgatagccatcctcagccctctgttacttcctctgcagtggtggttgggtctagaggcttgaggagagtcaagttaattgtttttggcaatattgtaagtctggatcttaaacacttactccttactccttacactatattaaggcattattgttaaaattttcggatataatggtcatgtagtgatggttttttttatagatttatacaggaaaattagtggatgaaatgatatgtctgagatttgctccactgtaataaaggatgagaagtacttgggggtaaagacaaaatctgacaggccatgagttgagcattgttgaatctggctgatgggtgtctggagggttcattatactcttctgtctgctttttgtagtttttagattttccataattttgtagtttttagattttccataattttatgttttaaagcctgttgttatttatctcaattaaaatgaatggaattctctctcacccatttatgaggatgcaataactatcaattcatgttgacttcagtaaaatatgttagtgatctacttcattttcatgggaagccattatttatcaaatcacttttttttttttttttgacggtgtttcgctcttgttgcccagactgaagttcaatggcactatactggctcactgcaacctctgcctcccgggttcaagcgattctcctgcctcagcctcccaggtagctgggattataggaatgcaccaccacgcccagctaattttgtatttttagtagagacagggtttctccatgttggtcaggctggtcttgagctcccgacctcaggtgatccacctgcctcggcctcccaaagtgctggcattatgggcatgagccgctgcacccagcctgtcaaatcacattttaaaaattaagctgaaccatttgaggtttctgagctttttcaggcaaaatgctcatatactggcaattttctgtgtttcagcctgatgcatggacgtcagctaagcagtcaaataccttccacatgcatgcattcattgttaggttttctaactttccatggcagtttactagttatcagggccaatgctgttaggactgaattggattcctagtttttaaaagctgtgactcaccattaaatggttgtagtgaattggtactgttgttgttgttgttgttgttgttgttgttgttgttaagaaatttaaagggggaaaaaaaagagactaggaagtacattaagtatgttaccctaagacagaaattagcttgttgtatttgaggcacagaagatatgtgtgactgccctgagtgagggggaggatgataaaagatgatgtcagagcagtggaaaagggacagatcatgttgggccttctagaattggtagacaggagtgaaatgatgtgactgccattgcaagtagtgctccagctgctgtgtggacgtagactgtagtgggagcaaaagaccagctaagttgttgcatagtctgggcaaaaggttggggttaggtggctcagaccagagtagaaaggaggggataccctagggggtggggggcatttcagaagtggcccactggaggtttgatgagtagagattaagtgattacttagaaaatacttaggaatgtgcctagcacatacagagtgcttgatttttggttcattgtggttaaaacactgaacagcaaccattttttgagcatataagtctgtttcaggctctgttctaaagtgtgttacatttcttggctcacgtaattcactctccgctgtgttgagatgggtagtttattaccaccattttacaggagaggatccatagcaccgctctgctcttgcaagtttctatgcacagtggcccctttccaaagtccatcttattctgcattctcagccacggagagatgacacttaactaaggtgaatggcccctcaaatgtagcccagttgttctttaagaaccagcttccagagaagttaagtgtctgggacctgacacagcctcgagtcagcatttgcccctgtgctagcagcatcctctgagcatgagatttgcaaacttggacagaattcagctttggtcatcatttcaacaatgaagctaatttaagcttacttctgcagcactgggaaagtcattatgaaataaaagtgcacaaatggagagaaagacagtgaaaatcacttatcatccattgctaatgagttcagccaaacgctggaggaatcagaataagtggtgtccgtaatagcttgtaaatgttttcgaactttttatttggtggatctcttgtggggttggttttcctgaccctggcattgtgtcaaacagacactgcgggcagtgtagcagataaacattaaaagttcccacctaccataaatcatgttttcagagaactgtgaacatggaatagcttgagaacttctcatagataggaagtccctgtccagagtctagcttcttttgtggtggttagagcatttgtaccagaactaatcttgctttttccatttgtgccagctgtgagcacctcctgcccacggatgcagcctgccatttcacgatgacctctcatcctatcttgcttcctgacccttttgttttttagcaatcatcctcttccagtggtagcgtgtttgggtctggaaacactggaagagggggaggtttcttcagtggccttggaggaaaacccagtcaggatgcagccaacaaaaacccattcagctcggccagtgggggctttggatccacagctacctcaagtaagttgagaagacttttcccagtcccttggtcccctaatgccattgtcattcttagggtgttatcaaagcttcagtgacaaatataaaaagaaaaaaaaatctagaaggctcatttaaaatatcttccccaaagcagtgtgatctgttttgcttttttatttttggttttttaatgagatgtcctatataatcatgaaaagatatcagagctgcagggagaggatctgtgtattgagctgctcccctcttctctcccaaggcccaaatcgctctgtttcttagtattggagtgacttgaagtgaatgcaagcagacaagcataaatgagcagcagcagagcaagccgaggatgctgggaggagagcatgcagactttcatttggatagtactctccaaattttccttaaaattcagctcctgtagggagatgtcacccaaaagttgaagcctttaatatttctcacctcttacatttttgttttattttcatctgaagctgtatctgccagtactttctttagctaattttttttttttttttttttttgagacagagtttcactcttgttgcccaggctggtgtgcaatggcgtgatctcagctcactacaacctccgcctcccaggttcaaatgattctcctgccttagcctcccaggtagctgggattacaggcacgtgctatcacgcctggctgatttttatatttttagtagagacagggtttcaccatgttgaccaggctggtctcaaacttctccgcccgcctcggcctcccaaagtgctgggattacaggtatgagccaccatgcccagccttctttagctaattttaaaaattcttttttttttttttttcttttttctttttgagacagagtcttgctctgtcaccaaggctggagtgcagtggcgtgatcttggctcactgcaagctccacttcccgggttcatgccattgtcctgcctcagcgtcctgaatagctgggattacaggtgcccgccaccaagcccggctaattttttatattttttttagtagagacggggtttcaccatgttagccaggaggtctcgatctcctgacctcatgatccgcctgccttggcctcccaaagtgctgggattacaggcgtgaaccaccacgcccaggctttttttttttttttccttttttttgaaacggagtgttgctctgtcacccaggctggagtgcagtggtgcaatctcggctcactgcaacctcccaggttcaagcaattctcccagctcagcttcccgagtagctgggattacaggcacctgccaccaagcctggctagtttttgtatttttagtagagacggggttttaccatgttggccaggctggtctcgaacccctgacctcaggtgatccgcccacctcagcctcccaaagtgctgggattacaggcgtgagccaccgtgctcggccttaaaagttatttgttgacctgtgtattcatggttggaaatgaaagaaatctgtttgtgtagatctttatcctgctgctcaggcggaagctgagattagaagttgggagcctgtcctgtttgtctcagcttctctcatttaatgtgccctacatgaagtttctctcatctgttgtgctgtgtgagatctccatgaatcatgagctagtgttctgcagtcatgacagatgtttccttaatattaaggcctgtgcagttagcaaaactttctatcctgatttgcccttctaaactcctaaatcaaaaactagtcagttttttagttcagcctgggcaacacagcaagtccccatctcaaaaaccaaacaaacaaaaacctagttattttgatgtcactgtccactccactaatacataaggaaagattattgtcaagagacacataccttttaccttgtgaaattatgtaatcagaagtttttgttctttaggtttcagtctgccaggagggatttagaatcctggatcttagaaatcaagtctagtagttttcaaaaactgtttttgccaatgaactcttaagtagcatcctgataaggaaaacaaaagtaggttcatgctgaagcaggggtcaggaactccaaaacacacagctggctggcaccacaggaccgtgaggctccatagcacatactttgaaaacatcgtccttttatggctcttcattttccattgaggaaacaagcccagaattctgaggtcacagagccagaaagtcacagatatagaactcagctagactatatgtcacatgccagacacagaatctggcacagaatagacacttaataacatgctccactgcagttagaaatttgggtttatcccagagctaaggtatcatctgcgaggttgtgttactggccaattttgttaaaagttaaatgtgtcatatccctataaacattcgtttactcatctctaatgccatggctcttgactgtcaaggagttgccttctgtcagtggctggctgcagctggtttgcacggacacatgagagccagccaagcacatcttcccagttgttcatttggtgacatcgtttggggtaacctgaaatgagccattgtggagtatttatatcatggaaatcagaaaaccctacaaaccaggactccccagcctgtcaaacattactggctgattcttctaattctggtttaaagtaaacacataactattcttgataccagataacctgttagtcttcatcttctaaatgttggctgttaactataaaccaacaatttacatgtgtgcctaagggaagtttaagtgattttgaaggagtagaggaaacacttaacattgtattattttaaaaactatatgattttatttcaatagtttttggggtactaggtgtatgattcaatagtgaaagggacaggaattgttttaactctgagggccaccaagtacagaataaaaggaaggaacagtggagaaggaagagctgggagtcgtctggggaaaggcattgtcctcaccacagtactcaggatcgtttctgcagaatcatcagtgacagcttctttctccttaattgactctgcatcatttgatgctttgagcaccacttctttcctggactgtatgaactgattctcctggttccttctgcctttcaaacaattcctcctctgcttctcttcttatctctaccttctctccctcccctcaccaacccccgcactccccgccccattttgctatggggcattccccgtggtcatctgttcatcacaatcttcttctcccttccccctggctcttccattgtggtctgaaaatccatgccaaacccgagtcttaagactgcatttattttgccccttttcctactcaaacccttgggcaacttcccactgactataggataaagatgaaataaacttgaaactggaattcagggccctccttgagctggccccaaagtacctttctgactgtactcagttccccagcacattccttctggtttggtcagtttgtctgcttgcatccctccctcacttcctccaggttcacttggcaccctgcacccaccttctgagcctgtccttctttaaaagatgaatgcaaggctgtttctgtgtgcactgcacctttgcctgagggtcattcaggcccaccatgatcgctccctctctggaaatcctgcagcccttggatttcatcactacacaaaccatcaagcagaaggaaaccagcctttattaatcacctgctgtgtgccagaagctcaatgcacgtgagctaaccacttcttacaacagtgcttttagatgtggctgtccccatttcactgataggaaaatcaggtccaagaggagatgtatactgcagaagttgcacagctactaagtggcgtagccaggatttagtccagctgcgtttcccgagctctgattggccttgtttacagaacgtctcccaggtacgcctttttgggcaacatttatgcatggaaaagaccccattatagagagttatttgagcagtcccctttgtgacatttatgccccgggctgctttgccctgaaactgcccactttacccctgagaagtcgtgagaactataacaatgaccgcaaaagacaagctgagaacaccagtacttggagttggcatgttctgtatccagaagctcaaagcttgcaagaagggcttcttctctctgtcatccccatagaatctactaaagaaaacctgggaacccatggagacatctaaaattcaccaccactgtggattgttacccataaggacctgttgcctcctttagtattgtcctgaggacactgtgtagggccattcccagcacattctttctgtttagggtcctgaaagacatatttgtctcatcagaagatgaagaagccgtttgatgatgatcttgtgggtttacagggtccctctacaactgttctttaagaaaatatcttggaaagtatcctgggcaagagcttcctgagagaccctttcggagtatgcattgaattcttgttcaatgactttagacctgcaggatgatatggggcctggtctgatactctgtatcggatttaattgctatccagtttatattaagtataatttaattcagattgggtcaggccctgatgttggatgatgctagtgtttttgccaaataaaagaccaaagaagatccatgttttgccagcagggtggaagcccagagcagatgccagttttacctgtacttggcacccctaaagtgtcagtcacagatggctatgcaaagacaaacttgttttttttactggatagtttatttacaagtcaagaagaatcttctacagtgaaatattgttcggtccgccaagatattctcttatggtaatatgagaatatggtaacatattttcaaaaactagagactatgttattttggaaccattaggagaaaaccaagaaacacattgttgacattagaaacagagactcagtcattgttttatgctactttgtttcagagcagtttaaatcaatggtaaaatgtctcaacatgcagagctccttgagagactgtaaatgagagtgattacagctttaatggtgtcattcttgggatcttttaaaaatgaaaaggatttgattatctcctgctgacctgctcagtgtcttactagctgaagtgtgattgagatgtggaaggaagaggttgaaggaacagagaagggcagcagccttttccgagagtctacaacataccacactagtgccctgtgtgcatcatgttatcttcccagcatccctgcagagtcacaattgctgtcctgttctgtgtgtggggaaactgggacttaggatagttaagtccttgcccagggtgacacagctattaggtaatctcacccgggtctgactgcaaacttcactgcttgttccactatgatatgccataaagattttaaagtcaaagagttcttaaagagagaaaaagattaaaaagcccaaagacttctaaatgatctctgacttcccaccactgtcccaataacatcatttcacctcacatttcatatggttgcaccaagtttctccaagaggagattcaaccccagtcttgcccttgaatttgtttgctatttgaattttgcattgctagcactaacaaagtgcaaaaatctgttcttgaaataccaagtaaacggaatggctgagaagcctgttttcatctccattgtcaaatgtactgccattgaaggaatcagacgtaactttgggctagctcgataaggggaaggtcaaactgctcagaaggccattttgtgggactccgtcaagggatacattatcctgtggtaccgagttatgagggtgatacaaagggatttcttaaccacccagctgccagtacctgacatacctgacatgtgggtccttagccaggctctcaaattgtcagcagtggttttatagggcagtgaccatgatgtgatgggccaagtcatattgtattactggtgcctggaaatttgaggtgactgggtcccaaagtgaggccactcacttcctggattgtggattaagagcattgcatctggacgtattaaccatggtggctctcctattagagttggttggtagcagcatgagttgagagacctggggaggtgacaggttaatgggggggccacctcttccaacagctcgactttgaaaatgatgttaagtgctccccctcctccagtcctctcctttcactttgcttgtgaacacctgactggcttagggagagactggtccttcattacccacccagtgattacccagagcatatgctgtgcctcccatttatgccttgtgtctttgggcatccactccacttcaggatagcttctccctgccttgtgggcatatattcaataaaacacccatctagacgtggtaggaaacgtgagttattccttcccttcccaccaacgcccaccccccccaaaaaaagtttgaaaactctgacatatcctgtgctatattatctgagtgacagctgctgtgtatgtggactttgtctgtttatctattattatctgtcaggtttgcatttcttgtaacaggtgaaaaaaaattctcagccatcttggtttttagtagtttccttttttcctttaattcttggagtgaattcagtgcatagttgagagggggatgaccccctagataagtatctaaaaggtcaagggcttcattaaacctcttagaggaaatctgactggaagtcttgctagcctctttaacattcttcagaccatccctatatccccttggatcaaagacaggagcaccatgatttttctcatttcactgccattctctgagcagctcaggcagccataagcatgctgaacttgactataaaagcaggaggtaagtgctagaagccattttgcctgggttggatttgttctaactttaatttccctagtttgacaaaatttgaagttggtcttgtgtgaagagaccaatcaaagtaagccctgttttccagaagaaagcagcctgtggggcagagcccatggcctccattgctgggcagtcttgacacttgcaggagcacccagtgagcttctacaaaggagccttttcagtgggacctctcactgctcctttattttgtgcctataaaatcatgccaggaaatcctgagcctgggtgccagaatgattaaaaacttcccagcaaggtgcgtgaaaatcagagaaagtacctgttgctgtcactgtcgctccgctcccttggcttctaggcggcttgtcactcccatctttccaaacacccaactgagactttttctgtgttctgagaagcaggtaaggacatttgtctccctctgacctccctcacatcttcatctcttcagatacctctaacctatttggaaacagtggggccaagacatttggtggatttgccagctcgtcgtttggagagcagaaacccactggcactttcagctctggaggaggaagtgtggcatcccaaggctttgggttttcctctccaaacaaaacaggtactcctatgtctatttgttatggttatctttatatatgtatttgtttatgcatagatatctggaaggagacatctctagggtggttatcttaagagagtaggattggagtaaagaagttaactgtttcctccgcattatttttatatttactgagcatctgctacattcctaacatgattccaggtcttccaaaacatgtttaaaagcatagaatgcaagtaatgcaacatttttttttctttttttttttgtgagagggagtctcaatctgtcgccaggctggagtgcaatggtgcgatctcagctcacagcaacctccaactccctggttcaagcgattctcctgcctcagcctcccaagtagctgggattacaggcatgtgccaccatgcccagctaatttttgtatttttaggagagatgaggtttcaccatgttgggcagtctggtctccatctcttgaccttgtgatccgcccacctcggcctcccaaagtgctgggactacaggcatgagccaccgcgcccagctgtaatgcaactcttaagagaacacagattcttcttggggagaaaacattgtaaatatttgacagttgcagaacaaacaaaataaaggaacacataaggaaatgataactgaagtatctgcaggaaagcatcctgagtcatggatttgttggggttcccattatttgtgagggtcaaagcagattatctgtttaatttctaatgtgtatgttactttcccctctttcgcaaatcactttttttttatttttatttatttatttatttttttttttttttttttttttttgagacggagtctcgctctgtcgcccaggctggagtgcagtggcgcaatctcggctcactgcaagctctgcctcctgggttcacgccattctcctgcgtcagcctcccaagtagctgggactacaggcgcccgccaccacgcccggctaattttttgtatttttagtagagacggggtttcaccgtgttagccaggatggtctcaatctcctgacctcgtgatccgcccgcctcggcctcccaacgtgctgggattacaggcgtgagccaccatgcccagcccccaaatcactttatttttaattgaagtatatgtttatccacaatccacataagtacacagctgaattaattatcacagttggaatacacccatgtaaccaaggaaaaggaacattactaggactactttttatcccagcattactattaaagtatatatttatataaactatatgcctttttataatcatgtatgatgtatttataactacaaatttttaatgaacagtgtatgtttagatctgaaaacatgtacttcatttctgtcatctgcctctccaccctgtttctgtctctgagatctgcggagagtctgcactcctgtccttgttgatggaaagttgtgtgaaaagagttttttttaagacaggtggtccagggtgggctgtttgagcaagcagctttttaaagcaaactccccctgggtaagtgggcaggacacttggccctcgtatgcaggggatgctctgaaatatgctaattccagaggaaggatctaacctcaggactagatgcatcagtggctctgacctgggagtaaggctgccccaaattaatacatggagtctcatatttagagcctaaagtgctgtggtttccaaatccactgtgcaccttacctcagattgtgactcaggtagcttagtctttctttggttgctagttgttaatactgttttcctagaaattaaaacagaatattctgaaatgggcttcacagctttctttttgctacacacacagtgcattgtttaaaaatgaaagggccacaaggcttttatcccagttagaaaggtgcatcgtgaacatttcaactggggaattttagttcatcgatcatcaagactttttatgtttttaggaggctgataatgttttctttgactcttaacggttttcctatatatggttctttatcctgagattatatccccattgatttggaaatctgacctttgaaaattccacctgtaatcccagcagtttgggaggctgaggtgggaggatcacttgagcccaaaagttcaagaccaacctgggcaacatagtgagaccccatctctaaaagaaaaaaggaaaatcacacctaattcagacactgggtacagtggctcacgcctgtaatcccagcactttgggaggccaaggaagacagatcacttgagtccaggagtttgaaaccagcctggataacatggcaaaaacccgtctctacaaaaaaaaataatgcaaaaataagccaggcacgttggtgcacacctgtagtcccagctcctcgggagactgaggtgggaggatcaattgagcctgggaggcagagattgcagtgagccaagattatgccactgcacttcatcctgggcaacaaagcaagactctgtctcaaaaaaaagaaagaaaatctgacccttttatttgtctagtcttagagaaaatgtatgccccaacttttcatagtaagtacttatttgccccatgaaactaatacttagattgaggcctcgaatagagaacaactatctttcagatacataagatgagtgaactagtaaccataaacatcaaagtgagggcaggggaaaggccactccccctcatgtttcaggacttcatctctctgctgcagaactcgtattggttctgggagagctttttctattgaaagaggggactggaagtcccgagcagaaggaagggctgctgtgaatagaggaactgccttcctgtccaggcatcagggcactttttgctttaagagagattttaagttgatgatttggatgggtctttgaaaaattccaaaagtatctatcctcccttcagtaaaattgcattataaaattatcctgctggaggtcatccggggagaggacaggaggaaggtgggatggactgaagatggccttgctgcccaccatggtcagtggtctacaccctgctgtctcgctaaagtgttagatttggagggaggcaggcaggggatgaatgatggggaagatgagaggtgggcgtttgagtcgcacagaccttgttccagtcccagctctagcacccatcagctggctgaagttgggacaagtggcatattctctaagtctcagtttcctcccctgtgatgtaaggatcccaggcttattgggaagatttaagaaaactgctgtgaagcacctggcatatagtgggccctcaataaatcagaaagtttatcatcattgattattagaaaatttgtttcttctggagaagaaatttatgaaaatacggcaactgataaaatcaaacccctcctgccatcaggagagagttgcctctttaagccagagtgactgttttcttcctgtttaatttggctgtgacccaggtgtgttgtttgggggctttttctctctgtgtatatttaaccgccacccctcccctgtccagtttattttctgtatcatcatgacttcccatttttcactcaccttccaccaagaagtctaagcaatattgatacaaggtactagatagcgccctgcatgtctaggaagaaagtgtaactagatctgtgatcagtcttaaataattcaactgtaagggttttttagcacttttttttttccagtctgttatatttataacccaacagtctccattatcatggcttggaatttcactcagtgttttaacatgcggaatgttaacccaaacacgagccttagcaaaaaagtatcttctcagttgtgcagcctaccactgttaatggcaaataggcacatgagtgaatcacaaaataacagttaactgagggattcagctgacaacttttcatacccaggatttgatctttcctgattcagatggcagaagcttgtgttgtgattacataaacaataagaagtctggatttcatccctctaacaacagattgactttctgaaaggggagaaaaggcttgtcgctaggccaccattactcccgctagcacgcagttcataggccaacactcaccttaagaagtactccctttagagggtgctcccagttagagcacatttcttatgccattctattccattcattcaagaagacactcactgagtgtctattctaatactttagaatgatttcagcagtatcttggaagtttgggaacccgcatcaggaatagctcaggagaggatgttttgtcttcctgcctgacaggcatcaccagcaatcagagtagggtgccctgtgcgtgacctgacccttgtctgtgtggccacctgtgtggtgctgccctctggcagcctgagcccactgggcagcagtgttggcaacgttgcagaaggcatctgaactctagggctgtcctcactgttgacttattattttattagatttatgcagcagcctgcctccaaagaagaaatttggtgtgttttttcattgggaagtaattccagactgcaggaaaaaagcatttaaaaaaaaaaaaacaaacctccactgagcgagagaaagggagactctgatgagagacgtaggagccatcaggctgtaaataaataaaaagcacctggctgggcgccagcatacacgtctctgtctctgctatgacccaattcagggattctccctgagaggaggttttgagcctctgattttataatttgggtttctatgaagctggatgtcttgcctgtgtactgataagtaatatagtctgtcatcttttgtcagctaggtagggattggagtttttgagaatggtttttcactccaaacagctcagaggacctgggaggggtggaaggtgcaccgagtgggctcttggaggtctgctcacacggcttcacagtgacttcacagggtctgcaggagctctcctgagtggaccccagagccctctgctaggaatggaggggagtggtttggtttgagggcttttgttttgttgttttcattactattttcttgatagaagggcgggggggagggggggtgttgccctttactctagttcttgcatttgaattgctaacatcctcttttcccttttttcttcctattttgatttggtttctcattgctcaatgtcttctcttcctgtctcctcctttctttctccctatttctgtttgtttgcctctgttttgctcaggtggcttcggtgctgctccagtgtttggcagccctcctacttttgggggatcccctgggtttggaggggtgccagcattcggttcagccccagcctttacaagccctctgggctcgacgggaggcaaagtgttcggagagggcactgcagctgccagcgcaggaggattcgggtaagccccctggggagggcccttgggaacccacacgccagccaaaaagcactaggggcctgtactcttgctctgaaaagaaatttgaccatgaggtgaaggcccctcccttgaaatttgtgaacaactccctcaaggattcctgtacctctccagggtaagactcatttcgttcaagccaggctttgttgaattcatggtggacctcagctgtgttgctgttccctggtatgagaaatgctggtcatcagagcccctgttctcctgctggggctaaaggaaggcaccagccctgccttaactactgctttgtagccaagaggtgccccggtgtggagcttctgttaggaagtcctcaatgaatggttttcaccagattctttcctcttgggattattctgtgttagacccgttgtccttgaacaaacaactccctgtgtcccctgctcccctgcagccccccagagtgagtattcagttgcacaggtcctcccgtgggaagatcctggatgatcagggatttcgaagctgctctcattgcctcgtgtgcgtctgcactggaaaaggccatttttagggagtcgcttttaagggcagaatttcagtgtggttgccaaaaccccaagggaaaaaaaccttcaccacaccacaacatcccaatttaaaaaatgtacacgggatgactaccaagtctcttgttcaaaggaggtgtcgatgcctgaaaggagttctaaaacgcctcttgccgcagtactgggctcagcatgagctgaaggtttgggggaggggagatgattttgtctaggggaattgttgagatacttggatctgagtcttggcaagatgacagcatctttatcttgaaaataaactatagtatgttcttactcacacccttcccctccgtgcaagatgctggagcgcagcagcaggagtgagagggttggcgtgctgcttctcctgtttcacgggagactgatgccttaggtttgccctcaggaaaccccaagaattaaagttaaggaaagctttgaaaggacagttagagacccacttaggctggtattctcagaggtcttaatggatgctgttctctgcagtgatgaaccagcacacagtaccacagagttggtagaaggtttgggttggctgggtatcttgtgaattgatttatttatttgaaaccagctgttttctttactagtagaaaagtatattctgccttggggcggctctcacacaaatcccgattggctggttagtcagtcctaaaaaaggttaatgccaggtcagttattaaatctccataagagcccattaccttcttccaggtccctggccatgagcctgtctccgaccctgaagggcaggctgttgctgatgaggcccaaggcaggaggaggaagggagcaggccgctcctgggagaaagtccaatgagagcagatcccttggccacctttgtatggaaagagccttgacctcaccattaaaagtgaatagaatggtgggaaggcagagttttagatactttttcttgctttggggttgattcttgcccccaggtgctgccccttctcccagaaaccactgatccgtttccctcacctagtcacctccagaccccagaagctctccccaacccagccgagttcctctgcaaacaattcaaggggctctgataggtcacacagtgccaccttgtgtgctggaccatatctggagggagaactgagtgagggggcacaggggattgtctccaggtggggcgagcaggggaaggaaaatagtggccacttttacattggtttgggtagtaattattgattcaggaagcaaatacaaaatcctgaatgaaatgacttggaaaaagtaaatagaatcaagatcccaagaggagctgaagataaataaatgggagcaggatgtgggggaatggtcggtaagtgagaaatgctaaaatgatagaataaagcttaaggattgttggaggtagagcaggaactgtgtactgcatagttcccaaatgccctggtgttccaatgggggatggaaactaaaacactggccaggttggatttcatactgtagtcctgccatttttcttcctagagcagagataaaagttggccctgggcgatagctcattctctctgaaaggctgctagttaggcccagcctgtcaccctggatcatgagtgtcgtgtgtattgggacttacagcagggggctgaggcttgcagatgggcaagtggtgagaggccccactgacctcagtctgtttctcactggagcgcaggtttgggagcagcagcaacaccacatccttcggcacgctcgcgagtcagaatgcccccactttcggatcactgtcccaacagacttctggttttgggacccagagtagcggattctctggttttggatcaggcacaggaggtaagctgccacaagttctcccctcacaagcaaaatgggtccctcttgccttctcccccaaagaaatgagtatgttttacctgaccagtctgtttagtattttaaaagctgactgggcacgtggttcacgcctgtaatcccagcactttgggagaccaaggcaggaggatcacttgagcccaggagtttgagactagcctgggcaacatggcaagactccattctctacaaaaaatgttaaaattcgccagacatggtggcacacacctgtggtcccagctactcgggaggctgaagcaggaggatcacttgagcgctgcagtgagctgtgattgcaccactgcactccagcctgggtgacagaatgagaccctgtctcaaaataaataaatatgtaacatactgaaagtggttgaaacatatatatatatatatatttttgagacggagtctcgctctgttgcccaggatggagtgcagtggcacaatctcggctcactataaactccgcctcccgggttcacgccattctcctgcctcagcctttgagtagctgggtctacaggcgcccgccaccaggcccggctaattttttgtgtttttagtagagatggggtttcactgtgttagccaggatggtctccatctcctgacctcatgatccacccacctcggcctcccagagtgctgggattacagcacctggcatatatatttttttttaggttttagttagacttagaacactgtgtcatttcttaccaaagaaattactgtcttgatttcctctcaggatttgagaagcccaaaataataatggtcttactaggccttggtttaaaaaatctaagccagcagactcaaaaaaaaaaaaaaaggcatagaaacttcacaaaacatcttgcatttgtttaacactctgcttcttcagatggcagaatatgtgtcttccattttgttcttgcagtaaactgacaaggcacagaatttaggtatcattacaattgtacccgtgaagaaacagaaactccaaggaactaagtgttagcagttagcagtagaaccaggcctagaatccagccatcttgcttctctggcccccaaaaagaagaggaagcaaatggatggaaaaacaacaacagcaaaaaaaaaaaaaaaaaaaaaaggttttcctaatgaatggatctatgtggtccagtacagctgagaggccaagccagagaccctctgcctacagctggggccgaggagggaggaagaaccctaaaataccaagaagataactcataaaaagtaaaggattttttctgccttctgggggatctgagtagctccagaggacaaactcagaataaaggggcttctgtgtgtacctttcctgccttcctgtaggtggtggaggcacggagggcttcccacaagaagcacagaggagggcagacacttagcatggggaccacctttgtctttcgagtggatgcgtgctttaacttcactcttattctgcttttcagggttcagctttgggtcaaataactcgtaagtatccccctttttgagtctcaccttaattaaaagcattaaataaggttggaagtgtgtggatcttgctggatttgtgcattttcttttcgttttttcctgtttttagagtttgtcctggaagtgtgggggttcagcagcagggtttgggttttgtggacttgctcttctctgtagcaatatggcaggaggtgccaggcctcgccttcttaagaggcgtggttcaaagagaaaagagcacgcctgccagtgagctgggcctgagggcagcgctgaggagatgctgctcctgacttccctggaggtttctcagaagctgcatgctaacccctgggctctgggccatcaccaggtctcatgtgttgatccaccctctgtgcttctgtgtaaaatttcatggcgttaaaattcagtcttagccaggtgggtggttcacgcctataatcccagcactttgggaggctgaggtgggaggattgcttgagcccaggagtcaagaccagcctgggcaacagagtgagaccccatctctactaaaaattaaaaaaattagccgtgcatgctggcttatgcctgtggtcccagctactccagaagctgaggcgggaggatcacttgagcctgggaggttgaggctgcagtgagccaagatggtaccactaccgtctagcctgggtgacagccagaccctatatcaaaagaaaaaaatatatatactggccaagcacggtggctcacacctgtaatcccagcactttggcaggccaaggtgggcagatatttgaggtcaggagttcgagaccagcctggccaacatggtgaaaccccatctctactaaaaatatatatatatacatatatagataaacacacaagaattagccaggcgtggtggtgcatgcctgtaatcccagccactgaggctgaggcaaaagaagcacttgagcccgagagacagaggttgcagtgagctgagatcacgccactgcactccagcctgggcaatagagtgagactctgtatcaaaaaaataataataaaaaatctgagtcctgacctttgcacacaggcagagcagcagagcctgtgactgctctgtgacagagcagctgactccaccactgtcctgtgcttccttgcaggtctgtccagggttttggtggctggcgaagctgagggcgtgtcagcaggcctttcgatccctgggaccaaccgcatcctcagcttcttccccgagaaatgctggagcaggctgttcagaccgacgttgccatcaaaacacatacacccagaaagaaacaacagaaaccaaaactcacaaggcgcatgattacttgttttatatttcatgttgggttttccctcccactattaaacagtctgtttccgtacagaa

SEQ ID NO: 409 - DNA, 938 bp, Homo sapiens
gccaagaagattgccccgtttctgtggctctgagaagccagcagagcctccatcagccagaacactgtgtcttcaaggatggcatcagaagtcaccagcgtcgggtgttgataaacagcatcgaatgtgccgtggtctcacttggacctagcgccctccacatagggaagaggttgaatgctggtgggtcatctttttgaggctgaaacttggttatctcctctccttgttcttttagccattgtgtatcaggaccatccaaggacgcactctgcgattgagtggaggcagaggaagccactcatgccagcagcagttgagtttcagaagcagccatagcgcttttcagtacagtacaatagtagccagcgtgaggcaggacagtgctgcgccttagccggccttggctctcatctccatgtggctcttgggtgccatgtgtcctactccagagaggagggggccggtcacttgagaagacagcctttatattctgtatgtggcagtgacattggtagccacacctacccagtgtctactaaccacagtgcagatagcccttgggtagacccaggaagtgtgaagacagacactgctgttgccagacaacactagcagaacgatgctggatttgacaacagtgtttgctaggacggcccagagctcatcactgcagttttattagagtgcttctttatctttaatgcagtatctttgaggcctgtaacatcctagatagttgccatcaaacaaggaccgtctcgcattgaaaacagatgtaagaatttctctttcaggcccagaatctgacagtgctttggcttgggtcatgagcagcggggagttgggaagagatttttttttttagagttttacatattggcaggttgtatttttttaatgttttaataaaagtttgacatgacattaattcatca

SEQ ID NO: 410 - DNA, 244 bp, Homo sapiens
atccattgttttccctagcagtgtggggctctctgacatgcttgttggtcttggaggggttctgagaggctctccctagtcttaagtgcttctgtcttaccagaccttccttctgtcccctcacttaacagaccatctgctccggccaccattcccacatgcacatttgtcatgtgtctctactgctgcagctttgctcatcttgcaagaagtccccactcaaacttctgctacagaaagccca

SEQ ID NO: 411 - DNA, 465 bp, Homo sapiens
tagaaaatgcctcagtcagccactgatgaaaatcaatggagactcacccaacagcagcattgcagcttctcccaggtcacctcgcggtgggtttctaaggcatgagaggaggtagtctcctcttgtttgaggaggcagtcagcttcctgaggccagggcactcccttacaagaggggttatcatttgcctccaccgtgcctgttccattagtcaaacacagtcggccagagcaactccatgcagcagccagtgtgccacagagcacctcggcaaatgtttccagatcttttcagagcactgggaaataactctttaagatgggtaccatcagctggggaaaaggtcatatgcactcctaccatgtctgatgtacctggcagtcctggatcactttaaaaaggcatttgagtcaccggagctactaaagggtagggctgattttcttccattgagatgaaaaaata

SEQ ID NO: 412 - DNA, 465 bp, Homo sapiens; identical to SEQ ID NO: 411

SEQ ID NO: 413 - DNA, 488 bp, Homo sapiens
tggctgcccacttcattccttcttttatttcctgagatccagagataccaataatccttttgagtggggtttttctgagaattcctgtaaatacatcaatttgtctacttcaaatgagccttcttttgaccgttgcaaagcaggatttttataagtatgcttatgccaaatgtgagagaataaaagaagccttttatttttaaaagagagacctactgacaatattctaggcatctcgtatttttctactgctaaagccagtgatgaatcagatgggaccttcaatgagttacccattttgctcagttgtaacttggaatttacagagaggctttggaattttccctgggaaccaaatcccactcagccaaagtagtcagagggagactttttggcaaacattcagagttctgacctaatcacgggtgaccacaaatcctccaacaaattcacccaccaaaaggactcacttgagatataccaatctt

SEQ ID NO: 414 - DNA, 264 bp, Homo sapiens
ttgttttgtttttgagacggagtcttgctctgtcgcccaggctggagtgctgtggcgcgatctcggctcactgcaagctccgcctcccgggttcatgccattctcctgcctcagcctcctgagtagctgggaccacaggtgcccgccaccacgcccggctaattgtttttgtatttttagtagagacagggcttcaccgtgttagccagggtggtcttgatctcctgacctcatgatccgcccgcctcagcctcccaaggtgct

SEQ ID NO: 415 - DNA, 264 bp, Homo sapiens
ttgttttgtttttgagacggagtcttgctctgtcgcccaggctggagtgctgtggcgcgatctcggctcactgcaagctccgcctcccgggttcatgccattctcctgcctcagcctcctgagtagctgggaccacaggtgcccgccaccacgcccggctaattgtttttgtatttttagtagagacagggcttcaccgtgttagccagggtggtcttgatctcctgacctcgtgatccgcccgcctcagcctcccaaggtgct

SEQ ID NO: 416 - DNA, 488 bp, Homo sapiens
tggctgcccacttcattccttcttttatttcctgagatccagagataccaataatccctttgagtggggtttttctgagaattcctgtaaatacatcaatttgtctacttcaaatgagccttcttttgaccgttgcaaagcaggatttttataagtatgcttatgccaaatgtgagagaataaaagaagccttttatttttaaaaaagagacctactgacaatattctaggcatctcgtatttttctactgctaaagccagtgatgaatcagatgggaccttcaatgagttacccattttgctcagttgtaacttggaatttacagagaggctttggaattttccctgggaaccaaatcccactcagccaaagtagtcagagggagactttttggcaaacattcagagttctgacctaatcacgggtgaccacaaatcctccaacaaattcacccaccaaaaggactcacttgagatacaccaatctt

SEQ ID NO: 417 - DNA, 337 bp, Homo sapiens
aggaggatcacttgatcccaggagttgactggcctgctcaacatagtgagaccccatctctaaaccataaaaggaggataattgtagtactattcttcttactaaacttttttttgataatagttatttttcattaaaaatgaatgatctgtgttaacatctacttgttattattttagtagttaaatgaattactagtttaatttctccattaaattttaatggtaaacatccacagatataatctacctaaacaaaagttctttatcatcctcaataatttttaagagtgaaaaagagtcctgagaccaaaaagtttgaaaaacacagctctaag

SEQ ID NO: 418 - DNA, 589 bp, Homo sapiens
ggctaaatagaactaatcattgttttagacatacttattgactctaagaggaaagatgaagtactatgttttaaagaatattatattacagaattatagaaattagatctcttacctaaactcttcataatgcttgctctgataggaaaatgagatctactgttttcctttacttactacacctcagatatatttcttcatgaagacctcacagtaaaaataggtgattttggtctagctacagtgaaatctcgatggagtgggtcccatcagtttgaacagttgtctggatccattttgtggatggtaagaattgaggctatttttccactgattaaatttttggccctgagatgctgctgagttactagaaagtcattgaaggtctcaactatagtattttcatagttcccagtattcacaaaaatcagtgttcttattttttatgtaaatagattttttaacttttttctttacccttaaaacgaatattttgaaaccagtttcagtgtatttcaaacaaaaatatatgtcttataaacagtgtttcatattttattcttaaataaatatgaacccttaaaacgaa

SEQ ID NO: 419 - DNA, 379 bp, Homo sapiens
caaaaacttcactctagctaagctatcttgttgcctactccttgtctgtaactgagccatggcatggggctgcaaaaaaaacgcacaaccacgctgttggtctcaccttatatttatggccacaaacctaaagtgggtttcacattgtccaacaatctttctctaagcccctagttatgtcctccttcttcttttccaaaatgactattttatatttcttcattttagccccatatgcactcccgtcccttcaccatcatcattctcagtggttgactttgcctcctactcattgagaaaacagaagctatgataaaatggaagcaatgagaatggaactgtcgtgtttccatcactaagtgtacccaatatcctgcat

SEQ ID NO: 420 - DNA, 115 bp, Homo sapiens
tttttgtattttttagtagagatggggtttcactgtgttagctaggatggtcttgatctcctgaccttgtgatccacccgcctctgcctcccaaagtgctgggattacaggcgtg

SEQ ID NO: 421 - DNA, 301 bp, Homo sapiens
ttttctttcaagaggattttttggggaagtgggcagataaagtaccagcagattactttgatgctatcaaatattagttttaggctttgttaggactagcccatttaaggtttgatctttctccaagaacatagtctttaaaccataagatatgcttcttcatatgtcagggattttcttatgtgtcaactgaaatcatggagtgtttattagaatgtttctttttgttggggcataaactccattgcttttctcagaacaatataaccactgaaatgactgctcaactgtttagctcttt

SEQ ID NO: 422 - DNA, 301 bp, Homo sapiens; identical to SEQ ID NO: 421

SEQ ID NO: 423 - DNA, 283 bp, Homo sapiens
tcccagcactttgggaggccgaggcgggcggatcacaaggtcaggaaatcgagaccatcctggctaacatggtgaaaccctgtctctactaaaaatacaaaaaataaaataaaataaaataactgggtgtggtggcgggtgcctgtagtcccagctactcgggaggctgaggcaggagaatggcgtgaacctgggaggcggaacttgcagtgagccgagatcgagccactgcactccagcctgggcaacagagcgagactccgtctcaaaaaaaaaagaaaaa

SEQ ID NO: 424 - DNA, 105 bp, Homo sapiens
tcccagcactttgggagggccgaggcgggcggatcacaaggtcaggaaatcgagaccatcctggctaacatggtgaaaccctgtctctactaaaaatacaaaaaa

SEQ ID NO: 425 - DNA, 5763 bp, Homo sapiens
  misc_feature (1871): n equals a,t,g, or c
caaggagggctggtgtgtagtttgtgatgttacccatagtgatgagaagcacaggtcactgcaaaagtgttcatggagaggaccctcctaccaaagaaatgacaagaatcttcctgcccagtccctgagtgttcataacttcctgaacttgcattcgaatgttcccattttataggcgagaataccaacaaacagaagttaagaacttgcccaagtttttttatgaactctggcatataattagagctaaataactgcttgtcaattgaagatttcaagatgatattagccactttaagaagccattatctaaagggtcatgttataactttaacactttaattcctctttgaactctttaaaaagcagaaagtacaaaagactgaaaactggaggccacagaagcttctcgaaacaaagcagacctgcaagttcctaaaaatgaagcataatggtttaaagagaaagtaatatccctaagcagtacactaatttggtcccacttagaatctgaatttatcaatcaactgactcattaaagatgatatagttggtaggttgaaagagcccggcactcaaccctgagcttttgcctttgggttgtatattctcttcacttcactatacctgtcctctattactcctaagttccctgaatttctcaccagcctgaaaaaccaattgtgcttccaagcctcataattgctctgttcttagtggtgtattcagtaagaattttacatccggccagaaataggcaacactaaacaaggcaaatataaccaaaatttcccatgctcacatcctataatatgcagtggttataaacacttcaggtactctagagttgtctttaaagagcagctagtccagtagtcttctacagtgggaacagctaaggcttaaatagttgaaatggtcttcactatgatagttttccaacatgtatcaaggccagcatctcagattaggactgtttcttatttaaagcaatataaaaaaatgtagaccaagatcaacttttctaattttacatattagaaaactgattcctatttgtatatgtattaatcaaatccaaagccatttactgaatttacaaggtatgctggaggctggaggtatagcaatgcacaagaaaggttgtatcctcatcttcccagagctctcagactagcagggaagatagcattacatacttattaacaatggagtgacatgtgcagtcatatacataagggagatcacttgatcataaaggtcaccctgaggaagtgatggatcaacttagtataggggttaaaagcatggactcaaaccagactgggttggaatacttgctttgccacttactagccctgtgaccttgggagacgcatgtaacttctctgagtcttagtgtccccatctataaaataggaataataatagtacctacttgcagcacattaaagatgataaaactagctaatatttagaaagcacttagtattttgcacatagtaagggatagtaataaaattgaaaagaagctgagatccaaaggatgaatagaagttacctagacaaacagcaagaagagaagtgttcttgacagagaacaccatctacaaagactgagaaaagaactagtctatttctaggaactgaaagaacccaagtatggctttaatagaatggactctgttgatgctggaaggtggcattccaggtctagataatggggtctaaggggggctggtagatcatattagggtttatcccaaaatagtggagattcagggaaaggtttaaagcatagacagtcttaatcatatttggttttttggaagtccttcaggcttctttgtggaatatggattgggtgggantggcactccccccacccaattgtagagacccagtgagagaaagtgagtcaagcaaggaaaagattggacccaggctttctgccttccaatctgatacttttctcgtgctgcacagcctttttctaatgtgctttggtggaggcacgtcatgccaagtgcattcctttcacttctggatgtttgcagtgcttaccctttgagctgcatccccttcattaagtgaatgtcctgttctcttgacgaataatgtaattactgagagaggagatcagattaaaattgagtttctataatgggccatttgtttggaagggagcctgaaggtatttctgaggactttaatcaaagggagaaaaagccagtagaacttctgtgatgatgatgattattatggcaattgaaatccaagcacagccatcttcttcatcagtgagtcatcactcacttttctgatgttcttaattggatgagatttgttttcttctgcagtctagactctcagggatggaagggaccttaagggtcatatagttcaaccctacaaagaaagcttgagccctgactgtagcacttttatcagatcatccagtccctgctgccatacctgaactgacaaggaactcattaccttgaaagacatctctcatacagtaaaacaactccaaaaggaagttcctccttttatggaagtaaactctgtctctgggtcctacttgtgcatctgttctggttctgcttctgggtacatgtgggacttatctgccccttctgcctcaagggaactatggagagatcttcaagcagctgccatattctcctaagcttcctctccttcagctgtcttctcaagtatgtttccctatgtgttaataatagtcaaggaaacccaacagtactgtgacttaaagaacaatgacgttcatttctctttcacaaatggttctgaattgagcagtctacactggcagccagctctactccccacagttatataggaatccacattcctttcagtaccctgttccaccttcacctagggcatttttgtcatctgcacaaatttaggcccccttgggttctagatgattgaaagaggaaagagagagttcacaaagaaagcccactgccttaaagcttaggcctgaaatggtgcacttcaccttcatttacatcccactggtcagaagttggtgacatgcctggtatttattgcagtgagaatgttcataggaaatgtggtttagacatgcccagaaaaggaggagaagaaatttaggggtcattcaccagtctccaccataccgtatgatatcagatgggcaggctatagctcagaggggcctcacacttctattgccagtttcaatatctttcatttggctctttttgtggcatgtttcaaaaaatgaatgtagtagagagcacagagcatttggatgcagacaccccagctccacatttataaactgagcccttaaatcatttcacttttcttaagtctttatttgtttattaaatcaggaggaaaatgttcatcccatgaactcttttgaaggcagaaagggataatcgatgaaattgcattttttaaaatgccaataaagatgaaatagtttggcttcagtcttcaaactagtggattcaatctttctctgactacccaacctaaagggttctttctgtttttggaatacccaaagaagttgtattcaccatcatcttaaaaagaaacttactgtgaaaggcttataagacagattcttttactttataggcatttgcaatctatttgaggaaacaaatggaagagtttgatggtgaccaatattagtagaagtagcagtaatgatgacaatatacaccactggtggcaatatccatttatcaagcacttatgtgccaagctctatgacaagtgcttatatatagtgtctggttgattttttataatattcctatgaagtaggcatttcatcctcatattatgggtaagaaattttagactcagaaagcttaagtactttagtgagagtcttacaactggtaactgacagacccaggatttcagtctaagactttgtatttatagagctcttcctcttgagttaagaagattcagttcatgaggccagatcatgtgcaattttgtttgataattggatcactcagcaaacgtttccagagtgcctattgtatgctgcgtgtttttctaaacattaagaatatggaatcaaatgggtcatcttagctagtgactttatctcattcttaaaagagaaaaaagaagccatatgataacaactacctgaaaattcatcaacctacttgtatgcttacccacacaccctgcctttccttttgttagaatggaacatgtccttattcctctctaagtccaactgcctgtattttagaccccatttgatcttactaaaattatccctatctcttctacatcttaaatttatcactttctgggccaggtgcagtggctcacacctgtaatcccagcactttgggaggccaaggcgggtggatcacttgaggtcaggagttcaagaccagcctggccaacatgatgaaaccccatctctactaaaattacaaaaactagctgggcgtggtggcgggcacctgtaatcacagctattggggaggctgaggcaagagaattgcttgaacccctgaggtggaggttgtagtgggctgagattgcaccattgcactccaggctgtgtgacagagcaagactccatcttgaaaaaacaattattactttctggatttcctatatgcaaacaaattagcaataatattttatatctttatatagataagtagacaggaaggaaggaaggaaggaaggaaggaaggaaggaagggaggaaggaaggaaattccttggccccacattttcctctggctataaatcatttctctacttcataccaaaatttttctaatgaattatctatactcatcctttccacattctcaccatgcatcactcttctctttccactcttaactttaattcacaacattcttctgaaacaccctttatcaagatcatcttagaccatcatcctgccaattctaatggtcatttccctgttttcatgttattggatctcatagcagcacttcacacagttaactgacaacctacttcctgaaatactttcttctttaggctttcaagataccacactcccttagtcctctttcttctccacagtggccactttttctcaggatcgtttgatgtattcttcgctcccatacattaaatgttaaagtactctagccactatgctttcttcttttctttgctcttccccagctatactcattttccacataattcaatctgttcctatagctttaaatgtcaactatatgctaatgagttccatatctacattttcaaccttaacttctcctgaactctagattagtataatcaaactgtctgcatagtatctcaatccagatgtcaaataggcaagtcaaaatgaatatattcaaaacaaaaactcaggtatttttcatcacagcaaatgaatttgggtaaaaacctgagggctatcattatttttttttctttccctcacatcttacatccagtccattagtgagtcttgccactctatctctaatatatgtccccaacccactcactttcctccatatcctctgccataaccctaatccaggtcactattatatgtttggactgctgaaatagccttgactggtctccctacttcttgcccctagaatccattctccacacaacagccagattatgtctctccctgcttaaaacctttcttggcttccattcctattcaaataaggttcttatcatggccaataaggcactacaggg

SEQ ID NO: 426 - DNA, 5760 bp, Homo sapiens
caaggagggctggtgtgtagtttgtgatgttacccatagtgatgagaagcacaggtcactgcaaaagtgttcatggagaggaccctcctaccaaagaaatgacaagaatcttcctgcccagtccctgagtgttcataacttcctgaacttgcattcgaatgttcccattttataggcgagaataccaacaaacagaagttaagaacttgcccaagtttttttatgaactctggcatataattagagctaaataactgcttgtcaattgaagatttcaagatgatattagccactttaagaagccattatctaaagggtcatgttataactttaacactttaattcctctttgaactctttaaaaagcagaaagtacaaaagactgaaaactggaggccacagaagcttctcgaaacaaagcagacctgcaagttcctaaaaatgaagcataatggtttaaagagaaagtaatatccctaagcagtacactaatttggtcccacttagaatctgaatttatcaatcaactgactcattaaagatgatatagttggtaggttgaaagagcccggcactcaaccctgagcttttgcctttgggttgtatattctcttcacttcactatacctgtcctctattactcctaagttccctgaatttctcaccagcctgaaaaaccaattgtgcttccaagcctcataattgctctgttcttagtggtgtattcagtaagaattttacatccggccagaaataggcaacactaaacaaggcaaatataaccaaaatttcccatgctcacatcctataatatgcagtggttataaacacttcaggtactctagagttgtctttaaagagcagctagtccagtagtcttctacagtgggaacagctaaggcttaaatagttgaaatggtcttcactatgatagttttccaacatgtatcaaggccagcatctcagattaggactgtttcttatttaaagcaatataaaaaaatgtagaccaagatcaacttttctaattttacatattagaaaactgattcctatttgtatatgtattaatcaaatccaaagccatttactgaatttacaaggtatgctggaggctggaggtatagcaatggacaagaaaggttgtatcctcatcttcccagagctctcagactagcagggaagatagcattacatacttattaacaatggagtgacatgtgcagtcatatacataagggagatcacttgatcataaaggtcaccctgaggaagtgatggatcaacttagtataggggttaaaagcatggactcaaaccagactgggttggaatacttgctttgccacttactagccctgtgaccttgggagacgcatgtaacttctctgagtcttagtgtccccatctataaaataggaataataatagtacctacttgcagcacattaaagatgataaaactagctaatatttagaaagcacttagtattttgcacatagtaagggatagtaataaaattgaaaagaagctgagatccaaaggatgaatagaagttacctagacaaacagcaagaagagaagtgttcttgacagagaacaccatctacaaagactgagaaaagaactagtctatttctaggaactgaaagaacccaagtatggctttaatagaatggactctgttgatgctggaaggtggcattccaggtctagataatggggtctaaggggggctggtagatcatattagggtttatcccaaaatagtggagattcagggaaaggtttaaagcatagacagtcttaatcatatttggttttttggaagtccttcaggcttctttgtggaatatggattgggtgggagtggcactcccacccaattgtagagacccagtgagagaaagtgagtcaagcaaggaaaagattggacccaggctttctgccttccaatctgatacttttctcgtgctgcacagcctttttctaatgtgctttggtggaggcacgtcatgccaagtgcattcctttcacttctggatgtttgcagtgcttaccctttgagctgcatccccttcattaagtgaatgtcctgttctcttgacgaataatgtaattactgagagaggagatcagattaaaattgagtttctataatgggccatttgtttggaagggagcctgaaggtatttctgaggactttaatcaaagggagaaaaagccagtagaacttctgtgatgatgatgattattatggcaattgaaatccaagcacagccatcttcttcatcagtgagtcatcactcacttttctgatgttcttaattggatgagatttgttttcttctgcagtctagactctcagggatggaagggaccttaagggtcatatagttcaaccctacaaagaaagcttgagccctgactgtagcacttttatcagatcatccagtccctgctgccatacctgaactgacaaggaactcattaccttgaaagacatctctcatacagtaaaacaactccaaaaggaagttcctccttttatggaagtaaactctgtctctgggtcctacttgtgcatctgttctggttctgcttctgggtacatgtgggacttatctgccccttctgcctcaagggaactatggagagatcttcaagcagctgccatattctcctaagcttcctctccttcagctgtcttctcaagtatgtttccctatgtgttaataatagtcaaggaaacccaacagtactgtgacttaaagaacaatgacgttcatttctctttcacaaatggttctgaattgagcagtctacactggcagccagctctactccccacagttatataggaatccacattcctttcagtaccctgttccaccttcacctagggcatttttgtcatctgcacaaatttaggcccccttgggttctagatgattgaaagaggaaagagagagttcacaaagaaagcccactgccttaaagcttaggcctgaaatggtgcacttcaccttcatttacatcccactggtcagaagttggtgacatgcctggtatttattgcagtgagaatgttcataggaaatgtggtttagacatgcccagaaaaggaggagaagaaatttaggggtcattcaccagtctccaccataccgtatgatatcagatgggcaggctatagctcagaggggcctcacacttctattgccagtttcaatatctttcatttggctctttttgtggcatgtttcaaaaaatgaatgtagtagagagcacagagcatttggatgcagacaccccagctccacatttataaactgagcccttaaatcatttcacttttcttaagtctttatttgtttattaaatcaggaggaaaatgttcatcccatgaactcttttgaaggcagaaagggataatcgatgaaattgcattttttaaaatgccaataaagatgaaatagtttggcttcagtcttcaaactagtggattcaatctttctctgactacccaacctaaagggttctttctgtttttggaatacccaaagaagttgtattcaccatcatcttaaaaagaaacttactgtgaaaggcttataagacagattcttttactttataggcatttgcaatctatttgaggaaacaaatggaagagtttgatggtgaccaatattagtagaagtagcagtaatgatgacaatatacaccactggtggcaatatccatttatcaagcacttatgtgccaagctctatgacaagtgcttatatatagtgtctggttgattttttataatattcctatgaagtaggcatttcatcctcatattatgggtaagaaattttagactcagaaagcttaagtactttagtgagagtcttacaactggtaactgacagacccaggatttcagtctaagactttgtatttatagagctcttcctcttgagttaagaagattcagttcatgaggccagatcatgtgcaattttgtttgataattggatcactcagcaaacgtttccagagtgcctattgtatgctgcgtgtttttctaaacattaagaatatggaatcaaatgggtcatcttagctagtgactttatctcattcttaaaagagaaaaaagaagccatatgataacaactacctgaaaattcatcaacctacttgtatgcttacccacacaccctgcctttccttttgttagaatggaacatgtccttattcctctctaagtccaactgcctgtattttagaccccatttgatcttactaaaattatccctatctcttctacatcttaaatttatcactttctgggccaggtgcagtggctcacacctgtaatcccagcactttgggaggccaaggcgggtggatcacttgaggtcaggagttcaagaccagcctggccaacatgatgaaaccccatctctactaaaattacaaaaactagctgggcgtggtggcgggcacctgtaatcacagctattggggaggctgaggcaagagaattgcttgaacccctgaggtggaggttgtagtgggctgagattgcaccattgcactccaggctgtgtgacagagcaagactccatcttgaaaaaacaattattactttctggatttcctatatgcaaacaaattagcaataatattttatatctttatatagataagtagacaggaaggaaggaaggaaggaaggaaggaaggaaggaagggaggaaggaaggaaattccttggccccacattttcctctggctataaatcatttctctacttcataccaaaatttttctaatgaattatctatactcatcctttccacattctcaccatgcatcactcttctctttccactcttaactttaattcacaacattcttctgaaacaccctttatcaagatcatcttagaccatcatcctgccaattctaatggtcatttccctgttttcatgttattggatctcatagcagcacttcacacagttaactgacaacctacttcctgaaatactttcttctttaggctttcaagataccacactcccttagtcctctttcttctccacagtggccactttttctcaggatcgtttgatgtattcttcgctcccatacattaaatgttaaagtactctagccactatgctttcttcttttctttgctcttccccagctatactcattttccacataattcaatctgttcctatagctttaaatgtcaactatatgctaatgagttccatatctacattttcaaccttaacttctcctgaactctagattagtataatcaaactgtctgcatagtatctcaatccagatgtcaaataggcaagtcaaaatgaatatattcaaaacaaaaactcaggtatttttcatcacagcaaatgaatttgggtaaaaacctgagggctatcattatttttttttctttccctcacatcttacatccagtccattagtgagtcttgccactctatctctaatatatgtccccaacccactcactttcctccatatcctctgccataaccctaatccaggtcactattatatgtttggactgctgaaatagccttgactggtctccctacttcttgcccctagaatccattctccacacaacagccagattatgtctctccctgcttaaaacctttcttggcttccattcctattcaaataaggttcttatcatggccaataaggcactacaggg

SEQ ID NO: 427 - DNA, 159 bp, Homo sapiens
tttttttgagatagagtttcgctcttgttgcccaggctggagtgcaatggcgtgatctcggctcactacaacctctgcctcctgggttcaagcgattctcctgcctcagcctcctaagtagctaggattacaggcatgtgccaccacgcccagctaatt

SEQ ID NO: 428 - DNA, 159 bp, Homo sapiens; identical to SEQ ID NO: 427

SEQ ID NO: 429 - DNA, 320 bp, Homo sapiens
caggagaaagccatcaggtcctagacgtggaagaaaggagcctaccaaagtgttggagtaaacagtggcggaggaggtgaggttttaaaaacaggaaacggagaggagttatcttcaccatgcacctacgcttctctgcaccttgtgtagctggtctccgccatctgggccttaaggcacttctgcagatttaacactttctctggcttattaaacaacaacagagggaaaccaaaagaccctggcgcaccattgctacggagaaacttgctaatacacttgctttttaaacctgcgctcctctttggccccggccaagc

SEQ ID NO: 430 - DNA, 345 bp, Homo sapiens
tacgcaggaggaggaggtgctcttaaagagaagtgtccttgttacaaatcctgcaaatggtctggggtttgtcggtgtggtgtctccttccctcttcccccagctggagaacgctgagtagtctctagaaggaagatctgggctggagaacccagtccggcagttcgctcagaaggtgtaaaggtgctcttgctttcctgaagtcaatcagaagccatttcttgaggccgtcagtttttgtttggagagtgtttctggtggaggagttgtgaggagaaccccggcattattgctgcaacgggaactagtctggggtgtttaattcaaactatggggctttcatcc

SEQ ID NO: 431 - DNA, 336 bp, Homo sapiens
ggttttcagatgggcttaactgggataaggaggagaattagaggtgaattaggacaaagcttctgaagagcaacttcccgaaaacagttctcaactcaatctcttgctggggccagtagaagataataaaaaaacaaaggaagggctgcccccagtacttagagcacttagcgcacacactctcggtcgttgtcaggggctgtttgcttcttgaaattctgctaaaaagccagccaattacatgcaggctgtcccttatatcctaggtaaccagccaggcatctttccccttagccttcctttgaaggtcttattcccctcttgccatcttttttc

SEQ ID NO: 432 - DNA, 1121 bp, Homo sapiens
ggttttcagatgggcttaactgggataaggaggagaattagaggtgaattaggacaaagcctctgaagagcaacttcccgaaaacagttctcaactcaatctcctgctgggcagtagaagataataaaaaaacaaaggaagggctgcccccagtacttagagcacttagcgcacacactctcggtcgttgtcaggggctgtttgcttcttgaaattctgctaaaaagccagccaattacatgcaggctgtcccttatatcctaggtaaccagccaggcatctttccccttagccttcctttgaaggtcttattcccctcttgccatcttttttcagtctgtccttgctgtgatcgctggaatatggaacacagagggcaactgagaaaatccttgaatttgtgaagtcaaagactattgggaggccatgcctgccatttccctgaaaagcacttcatttaccaaatactaatcagattcgaatggacatcagcccgggcgagttgttaaattattgctgtaatttgaaaaatgagtgtgtcagagtatcagggaagctcaagaatctggccagagctgtcatttagagaggcagaagtggacgtccttgggtgctgagggccctcaggactctcctggcccacaccagtgcctccccacataggcactagttggacaacaagtggaaagatgtggccttccctgctccctttttttttcctttttttaaacttatggtaaaatacgtataacaaaatttaccatctgaatcatttctaagtgcacatttcagtagtgttaagtacattcggctgggtgcggtggttcacgcctgtaatcccagcactttgggaggccgaggtgggcagatcacaaggtcaggagatcgagaccctcctggccaacacagtgacaccccgtctctactaaaaaaaaaaaaaaaaaaaaaaactagccaggcgtggtggcgggcacctgtagtcccagctactcgggaggctgaggcaggagaatggcgtgaacccgggaggcggagcttgcagtgagccgagatcgcgccactgcactccagcctgggcagcagagcgagactctgtctcaaaaaaaataaaaaagtacatt

SEQ ID NO: 433 - DNA, 367 bp, Homo sapiens
aagccagggactgactatcggagagttgagatctgaatcccagctctgcccctgaacagctgtgtggctctgggcaagtaattgccctctctgcacttctccacctatagaggggacttcctaatgcctgggcctcagattgtcataagtgagaacatcaacactgtagcgttcagcatgtgacacaggagctttctacgaaccctggccaaggtggagggcagagtgaggcgctcgaacagcaatttgagtgtggttgcatgacctccacttgggcaccaagcacgtttctgtgggacccgtttctctgttaatttctacagctagtaagtgagcttagtgagtgtgcaggtaagtatgtgtgtga

SEQ ID NO: 434 - DNA, 311 bp, Homo sapiens
gcactcatttccacaacttaagggggcagtgcaaagaaaagagcccacagtagcctggggcagagactaatgccttggtacttcagtttcccctgccttaacatgcagagttgagggtacataagtatttctaccactgcagaatatagagatggttttagatggtacagggagagccttaaagaatatggtggccaggcgcagtggctcacacctgtaatcccagcacttcgggaggccaacacaagaggatcacctgagcccagaagttcaagaccagccaggcaacatagggagacccctgtctgtac

SEQ ID NO: 435 - DNA, 367 bp, Homo sapiens
aagccagggactgactatcggagagttgagatctgaatcccagctctgcccctgaacagctgtgtggctctgggcaagtaattgccctctctgcacttctccacctatagaggggacttcctaatgcctgggcctcagattgtcataagtgagaacatcaacactgtagcgttcagcatgtgacacaggagctttctacgaaccctggccaaggtggagggcagagtgaggcgctcgaacagcaatttgagtgtggttgcatgacctccacttgggcaccaagcacgtttctgtgggacccgtttctctgttaatttctacagctagtaagtgagcttagtgagtgtgcaggtgagtatgtgtgtga

SEQ ID NO: 436 - DNA, 7017 bp, Homo sapiens
ctgagatagcaagaccaatccttcctcttcttcctccttctcagtctacacaacaagaagacgacaaggatgaaggcctttatcatgactcacttccattcaatgaatagtaaatgtattttctcttccttatggttttcttaacattttcttttatttggcttactttattgtaagaatacggtatataatacatatagcatgcaaaaaatctgttaatcaactgtttaataaggcttctgtatataatacatataacatgcaaaatatctgttaatcaactgttatcaataagccttctggtcaacagcaggctagtagtagctaagtttttgggaagtcaaaagctatatgtaagccaggtgcagtgactcacacctataatcccagcactttgggaggctgaggtaggaggattgcttgaggccaggcgttcaagaccagcctgggcaacatagcaagatcccacctctataaaaattttaaaaataattttttaaatttaaaatgttatatgtagatttttaactgtgtaggggtcagtgccctgaccttctcattgttcaagggccaactgtgtattagcttatttgtcccacctgcaccacaactctgtgagctactatcattatctccattttacagatacagaagcttctgagaggtaactgacccaaagttacaaagccaattaaagtggtaaaaattggaccctactcaggcctgttggcttcctgaagtaacacagcaattgagtagaaacggctgctggaaatgcttcataggtagggaactaagccatttaaaattttatttgcttaagcattccttttttatagttgatataaaggtaaaattcagtacagttctaccaaaactcaaaatctgcattactggagcccagtcaatgaactttcaccatgatattaatgacttaagctcgtgcatggatctacagaattatactgtgattaacatgcaccttggcaaacaattttttttttttttgagacagagtctccctctatggcccaggctggagtgcagtgacgtgacctcagctcactgcaacctccgcctgccgggttcaagcaattctcctgcctcagcctcccaagtagctgggactacaggtgcgcaccaccatgctcagctaattttttgtatttttagtagagaggggtttcaccaggctggccaggctgatctcaaactcctgaccttgtgatctacctgcctcagcctcccaaagtgctggaattacagacgtgagccaccgcgcccggcaaattattttttagccactttaacttagtattttcagtgttttactgctacattttgtaaccactctaatatttacatatcatctgtactattatttacttaaaacttttacttaatgttttaaaggaaatttaatatcactgctctaaataaagagacactaaatcactcaataaatatttacaaagtgcctaatacatactaggcagcggggatatagcagtgaaaaagagactaaaaaatatccccaccctcatggagctaatgttttagtaggggtgacagacaataaacaagataaaggacgggcaggtggctcacacctgtaatcccagcactttgggaggccgaggtgggtagatcacctgaggtcaggagttcgagaccagcctgaccaatatggtgaaaccccgtctctactaaaaatacaagttagcggggcttggtggctgatgcctgtaatcccagctactcgggaagctgaggcaggagaatcacttgaaccctggaggtggaggttgcagtgagcagagattgtgccattgcactccagcctgggcaacaagagagaaactccttctcaaaagaaaaataataaagtaaaataaacaagataagtaaaatatatagttagagactgatcagtactgaagggaaaacggggtgtcttagtccattctgtgctgctgtaacagaatagctgagactgggtaatttctaaagaacagaaatttattctcttataattctggaggctgggaagtccaagatcaaggcaccagcgtctgatgagggccttcttgctgtcctcacatggtggaagtcagaagggccaatgggacaaattctgtgtcctcacatggcatgtgtagagagagaacccactcctccaatccctttctataatggcattaatccattcttgagggtagagccctcatgatctaaacacctcccattaggactcacatcccaacattattgtattggggattaagtttccaatgcatgaattttgggggatacagtcaaaccatagcaggggatatcaagtgtgtgagtcattaaaattgttgttaaatagttaaaattttagatagggcggccagggaagacctcatcgagacagtgacttttaagtaaagacctgaaagggacaagccatgtggaaatccaagagaaacacaattcaggtagtggaacaaacaaggcaaagcactgaggaccgagtgtgtctgggatgcttaaggaacaatagggaggtcatgggcagaagcaagaagactagagagctaatgcaaaaatccaagcaagagatgatggtggcttaaaccagaatgatgagaaatggtcagattctagaaatatgaatgttaagtcaacatttgctgatgggccatttagctgatgggccattacaaagtgtaagggttaggggaggagatcaaggaaaacccccaaattttgacctgaccaagcaactggaaggatggcgcccaatacatttcttttttctttctttttctttcaatgaaccatgtgtacagtttttcatatttcttctttttctccccacccccagatttgcatttctgtcacttgcaccacaacctccccactcaatgaaagaaatttagaaagcactggtattcaaaagaacagacgtaaaactgcttgaggttttgctcatctaaagcctgtgtgttctttggaggctatgacttttgagggcaagtcataaaagctaaagaggcccctgccctgttcaccaaaacacttgttctaagttctaaaacactgtagttctatgattctgaaatcttgaaaggattacaatgaaaaaaatactctgttttcaagaatccagcagacacttttcagaatactaaattttgtatattgtaaatataccaaatatactgtgaatattatcagtataatgcaattctgttcagcataatactggtacattgattggttggctgggtgccaaggaacacagctttctcagggaacagaaatactcctggttcttaggatttaagctattaacacatatctatgcttgaaaaccacatgccacttttgttaaatgaattgatgcagttcagcatcataagctcaaacattcactaatttcacctttttctgatttattcacttgtttattagttcaaggagaggacagtttaaatagaacaatatatacacaatgatagtttcatgatgagccaagacattaagtaagacaaacaaggcaatctgattttatgttaaacattggcctgttactgtattattaaaataatagtggtatttgagtttggagccagtattgtggtctctgtacaaaaataatgcctttctttggcatcaataaatcagtatgcatctatcttaattatatcagcataaaaaatagcttactctccttggcagtaaataacattgccttcaattagccaaattatatttctgtctcaaactacatccagtaccatatattccatgtcatcagagaaattctaaattatcactgcagattgtgtttatttttacattggactgtatcacaaactgaacatttaaaatatgaaaaaggaaaaaaccttcatataactgcctctcagtgtgcctcctctctaaagcttctaggctgctttctccactgggctgcagaccttcctgtctagtagctcttggacaccatgtgtcccaaactgaactcatcccttccctccagctgcccctattcctgtgttctgtgtatctattcatgacatgtccatccacctggtcagccacgttcaaaacttgaatcttttgactactcactatacttcacttcctatatccaattggttgccaaatactgcccactgaacagcttccaagcatctaatctctctcttctttatctactgctggaattctcttcctgaagcccagatttatgttattatttgccttacattttcctcccattttctatggaatggcctaactccttagaatggtaccaagattttccacagtttggccattcctttccaccccactgcaccttgttttcattgtcctcagaatttcatttataaaggtgactgggtgatgacaatcaatgagttagtggccaatgcctttgaaaattttattatagttctcaagagaaggggctgtgcctacggccacacgagaaagtattagggtcaatgaggaggtagagagagcgaggagaaagcccagagcctttattgccgtgggaaggaatgggcgaagcagggaagggaagtctgaacaagcttaggattgaataatttgaataatgttggcaagctctgggatatagaggtgaattttagttgtctggtacttggccatggggtggtttattacagtgacttggggcagggaaaatattggtgtgtgagatggataaagatggtgtggggatataggcttgggttggttggtttgtaaatgaaaggggtgttcacaagcaagttgtttgctatctctaggaattagctaactctgaaaggggcaattcctccccaggtccccaaggccccaagatgtcaaagcatcataaaatacagaaaacagaaactaaaatccatggttaatacacacctcccttcacacacaccctttactcccggctccagtagccccagaaatgctctagacgaagtaagttctgtagtgcatctctcaacaatatgccgccacccatagccctggctgaggagagccaccaaacctggtactatgcgaccatggtccttcccctggtcactggatagtgatcgcacccaacacaggcacccccatctacagggtggctggagatctatgaccattgtggcgtacctggaccaatcaataaactggaccaattggatttccatttttagggatttaaattcagagccacaaaaggagattgtcagttgatgatgagctaagacaccctgaagtatactcacaaccttagcaagccatgtgcagtctagtgctccacccctctacccaccccgtccaacccccaccaaaatactaacaaaatacaacacactagttcatcatctagaccataataactcgctggggatagtgctggaagtttttgtttgtttaacatttctttcaaatactaagattaacggagttgcatagtgaaaaaaactgtaggaaagggtcggacttaggcctggagtgaagggcacaagatgcttttattttaaacccctaaaagtgttgcaaagtgtttttaatttcatataaatagttaaggatcacatgaacacaatccagtacaaatgggtccaggagcttcaacgagcgttccagcttcttcgtaacgttcccacaccgtgcagcaagcggagggaagagaacttccggcgcccccacctaccgctccccagccgtgtcccgctgctctaaatctgcagacttgatcgattgcttctgcctgggcggtaccgcccgaattgactgctcctgtctgatgcgtccccgggcgcgggaaacgagtttcaatccactttcctgaccccaaccatcctgcccagtctccgcttccccgtcttgtacacccctaactcctgaggctcctccgaatcacgcgagtggaagcggagaagctcaagtggccgccatgtcagaggcttatttccgagtggagtcgggtgcgctggggcctgaggagaactttctttctttggacgacatcctgatgtcccacgagaagctgccggtgcgcacggagaccgccatgcctcgccttggcgctttcttcctggagcggagcgcaggcgccgagactgacaacgcggtcccacaggtgagcctttgggtgcggggtcctgcccggaaagactgcagctcccggcgggcccctcggccctgggacgccgcatcggggcgcgctgccctttgggatttgtagttttcgaggagccagggccgaaggcgctaacgacttctcggaaactccgcgggggtcccttcgcgctcggggtggtctccagacttcttgttcgccatctgtggtgaaactacatttatcctaggtcgccaggcagcctccaacattgatttcttttttgaaactgtccaaattagtgtcttccccctaccccatgcaacgtgtgttgaatgcttaaagattggctccagctgaatacttaagaattagagttctgatcatgtttgccttaaaacagctttgggttctgtaagagcatgtgataagtaggaaccccaagttgctaaattcattcctccataatgatgacaggatcagtaagccctactgaggcttacttagtggcagcatggttgggtgtggggagtaagcttttccctttaatccttcagcaaccagaaaggctgggtcacttggccagggcttcagttagtggtgagctgggattcggaacccaaggccatatggcttcaaatataaaattgtcccaggaacatggcttgtaatgattaatttggatatcctgtttcacctaagttttgtatagaacgatgtttattgtttggtctgtttgtttcaagttaatttttatcaaagtaatacataaccaacgttttaaaagtcaaataggccggatgcggtggctcacgcctgtaatcccagcactttgggaggctgaggcgggcggatcacgaggtcaagagatccagaccatcctggccaacatggtgaaaccc

SEQ ID NO: 437 - DNA, 267 bp, Homo sapiens
gaggtgctgaggatgcagcactaaacaaacatatgaataaatgatgataagaaggacattgattgagctcttattgtgggctaggccctgagctcagtgctgtgtatacagttgacccttgaataacactggttgatttgaactgcatgagtccccacttatacgtgaagcttttttcaataaaagttataccatgggccaggcatggtggctcacgcctgtaatcccagcactttgggaggccaaggcgggcagatcatgaggtca

SEQ ID NO: 438 - DNA, 102 bp, Homo sapiens
gaggcaggagaatttcttgaacccaggaggcagaggttgcagtgagccgagactgtgccactgcactccagcctggcgacagagtgagactccatctcaaaa

SEQ ID NO: 439 - DNA, 5664 bp, Homo sapiens
gccttctggccagtaatgtagagactctcccccgcccccgagggcgggtccttatgcacccccaagccctttcttggtgtgggtccaacatcagtggatgagccaaagctcaaaactagccgtctaccccgagtactgagaaatctctgctaccatgcccagacccgccactgggtcatccgcagtctgctctccatcttgcagcgcagcagtgagagtgagctatgcattgaaacacccaaactcactacaagtgaggaaaagggcaaaaagtcgagcaagagctgtgggtcaagtagccatgagaaccgtcccctggacctgctacacaagatggagtcaaagagctccaaccagctttcctggctctcagtatccatggatgcagccctaggctgcaggactaatatatttcagatccagcgttcaggggggcgtaaacataccgagaagcatgcaagcggtggctccaccgtccacatccatccccaagctgctcctgttgtctgcagacacgttttggatacactcattcaattggccaaggtgagggtttcaaacccaactcctggggatggaagaagggtggcagcaagagcctgggtgaaagttgaacactaagcaggctagcgtgtctttttgctcttattttaagtgttgagccctgtattgtttctaggggattgtcctatatatttctggggttttttcttcattcttttccatttttatgtatgtcttatttagtcatcaaaacaactgggctgtatgattcctgttttacagatgaagaacctgagattcagaacattttattcattttgtcttatgattagaaagtgatggagctggacctagaatttagtgttctttcaataataagcattgctgccatctatcaaaggcctgccttgtgccaggcactgtgcaaaatacatcatgtcgtttaatctccaacaactttgcaaggaagtgtagttatctccattttataagtgcgagactaaagctcaggaaaagtttgctcgtgagtctgtattgctacaaagccctcattcatttctctaggctgctttactgtctgttggataaaactcttatatgacatatcccccaatatttaccaaaattgtctgaaggagtctgggaaccagttgtcttttccctatcaggaaggctcatcctctgtgaagacgtcctagaccaagccttgtcctccttttcccggcaggtatttcccagccacttcacacagcagcggaccaaagaaacaaactgtgagagtgatcgggaaaggggcaataaggcctgtagcccatgctcctcacagtcctccagcagtggcatttgcacagacttctgggacttattggtaaaactggacaacatgaatgtcagccggaaaggcaagaactccgtgaagtcagtgccagtgagcgctggcggtgagggggaaacctctccatacagcctcgaggcctctccactggggcagctcatgaacatgttgtcacacccagtcatccgccggagctctctcttaactgagaaactcctcagactcctttctctcatctcaattgctctcccagaaaacaaggtgtcagaagcacaggctaattctggcagcggtgcttcctccaccaccactgccacctcaaccacatctaccaccaccaccactgccgcctccaccacgcccacaccccctactgcacccacccctgtcacttctgctccagccctggttgctgccacggctatttccaccattgtcgtagctgcttcgaccacagtgactacccccacgactgctaccactactgtttcaagtaagtgtggatgtagactgggagctgtggggtatatactgtggcacccacttcacccccttttccatccagatagttctccctcagtgatagcaatcagcttggtttgtgtttgtgagaacagaatgtgttcattctcaccctcatctgtcccagttctctcactctgtctcccttcctccatccccgtctctctgtgtctctctctttctctctctcccctgcctctcacacacacactcttttgaaggtcagcaggcattcactgaatgtagcttccctaggctaggcaccagaaggaggaaagaaagttaagttccatcctcagggaattcccagcctttccagttgtgttgagggagccagttctcatgggaaatagttcaagggcgggcaggatacagtgtgattcagagtaaccagatcatcccaggaaataaaggtaatgagccctgccacagattagtaagaaagaattatctgaagaagtaggttttaaagaatagagtgggccatgatggtgggggaatagttggaagaaatgcctggggtttctttttcagcttagaagttacagtcataagagtcctctttgagtttatggtgagacgtgattgtgccactgcattctagcttgggcaacagagcgagaccgtgtctgtaataaaaaataaaaagcctttatcatcccaagtcatttagatttgcctttggtgggtgggttttctttttcagtactttcccattttgaagccctgggcaattcagcgattccttgattttgtcacttagtccctggcttgtgagtttcagagaggcttacagtgttctgtctgtttcctcaaagtttctcccactactaagggcagcaaatctccagcgaaggtgagtgatgggggcagcagcagtacagactttaagatggtgtcctctggcctcactgaaaaccagctacagctctctgtagaggtgagtccaagctcttctgatctgctaagacttggggagaaaggataaacagggtagataatgattttgttctcaggctggggcttactccttctgtcttctttttctcaggtgttgacatcccactcttgttctgaggaaggcttagaggatgcagccaacgtactactgcagctctcccggggggactctgggacccgggacactgttctcaagctgctactgaatggagcccgccatctgggttataccctttgtaaacaaataggtaatagcagaagtaaagcattttctctttctgaaggtttccacttaggtgcttcctctttctggaatcctttcctgaatccccaagctgaatcagatacctccatatccctataacacagcctccatgctccctctgtcgtaacacagattaccctgggttatcatctgttttcctctgctcagttgtttgaaagcaaggctgggtttgtctcctcatccccgctgcccggcacacagtggtgcttaatgaagagaaaagagaacacatgggaacagcagcgcctcctttcttctccatgctgggcactcgtaagagccccataagacagctgaggcagcttcaccccttcaaagtatgtccctacactgcattcagcctcaggaattacagagtcagaatagtactctctgcttttgtgtaattttgagggtataaaaattctaagaacagttacaaattacctcgtttctatcatcttcctccctgttttactgagaagaaagccaaaacccagggtgataaagtgattggaccaaggagtacagccaggttttctttcaacatagagtctgtctaccctgtcccaccctcatcccaatcatgagtctccctagatcttggctacatacttagttctctctctccttcacccccatgtccctaagtctggggtgataggagagttggttggcctgtataactcagggtgttctttgctgcatgaaaattacaacgttcttccagaaagaatttggcctctgacctttctctcttggctgccaccatctattccacacctatgggccaggcactgtctaggcactctaccatataattatctcttaattgtcacagcaacgttatgaggttaggcagtaatattcccatcccagtattaatattggttagcaaattgggtaaggggtcaagaaatttgcctgaaaccaccacagaacctcagtaattttgagagatatatgggatttcaaccatggtctgtttagctccagaggagatactgtttctcttctacatgaaactcatttcatgcagattcagcagatccctgtggccataggtaaattggtagtcccaggtgacggttcgtggacacgcataataagctgaacagagcacgattccagctcactctaggttctctgcagctgagcaatgaagagtggcctaagcaggtgtcttagagagatttggcttttagccactttaccaggggagtctctgaacacttgctgactcctctgcctgctcaggtaccctgctggccgagctgcgggaatacaacctcgagcagcagcggcgagcccaatgtgaaaccctctctcctgatggcctgcctgaggagcagccacagaccaccaagctgaagggcaaaatgcagagcaggtgggtggtagccaccctttggctgggggcttgaatctgggatattctggaagatggctcttgctggtttcctggtcttttttatttctctgggtgattttcgtatctttcctatacacacttgacccatttttttctacttcctacttggaagatttccttctgagtttccttacccctctggttgacaccaggaagccttgcttgctttgggtgtttatactttgatgctgtcaatatacgcaagccacctctacactatccaggtttgacatggctgagaatgtggtaattgtggcatctcagaagcgacctttgggtggccgggagctccagctgccttctatgtccatgttgacatccaagacatctacccagaagttcttcttgagggtactacaggtcatcatccagctccgggacgacacgcgccgggctaacaagaaagccaagcagacaggcaggctaggtatggaactagagtgtccagttgaggggaagggttggtggcggtaaagccagattccttggaggtgcaggacttaacggcctgtctccttcctgtttgacctttccaaaaggaaaatgattatccttttttcagaatgttgatggctgcattctacatctcattcaagctatctgcgtaggaaattcattagggggagtgggaattaagggggagtggaaatctggcagggaagttgggggccagccttttgctgaacaagacttaactcactaggtgcatctcctttctgcttccttggtcatttctaactaagccgtggcttgacaaatcattttccctacctctttcctcctgtcccacagaaccctctcgcacaaaaccatccgtctgtctagcatcatgccccctgcccttatctgtaatggtaaatcttagcgcctgatgatgagcactctgaagcttcctgagctaaagctcaaaagacctcagcaagatgccctgtggcagcccaggagataggagagagaatattgggctttccctcttcctatattttatatcttgccttcctctttctctttctcccaggttcctccggtttaggctcagctagcagcatccaggcagctgttcggcagctggaggctgaggctgatgccattatacaaatggtacgtgagggtcaaagggcgcggagacagcaacaagcagcaacg

SEQ ID NO: 440 - DNA, 1515 bp, Homo sapiens
ctgtgttctgtatcccttgcctgacaatgatgctttggtactggggtggcagggcctgagctgggctggatgcctcagtgggtactgctgtctttgcaatgtctgggttatagaagaaacactggtgagctgagcaaggttgggattccactttctgggactcccccaggcatacctaggggctcaacctctgtacttcaaggcatctcaacgctgaaacagaacagtgacctctcaaactcagccaggcagagctattctggatgacatcctggggaattctgaatggggccatttcattcaggcctcagaaagatcctctggaaagtgggatttatgatgtagcccagatgacacctctccgcctggcctgcccctcacctaaccctcctgcatctcatcacgcggatggcttcactccgcattgccagtctcctgagcatcctgggacccagagtcacaggctgcagagcaatgttccatgcccgctttgaggattgtccagttgaaacatctcatacccacagtcagggttcccgtgggccatcactgcacggcacaccctggagtgctaacacttggacaaaaagctgacctgcctcaaatcccagaatagcagctgtgttcagtttgggggacaaatttataaatgtcatatatgtagacaaatggatgcttaggaggcctactccactgagcagtacttctccattttactgtgcatagagatcccctagggatcttgttaataacacagatgctgattcagtggatctggggtgggaacctgagattctgcatttctaacaagctcccagacgatgcagacgttgcaagtctaaggaccgtattttgaacagggagtcctcagggtgtccaactttattccatgatgtgctcatcagtttacgctgctgcttaggcttctctgatttggctaactccaaatcctctccaaacttgtcaaaacagagctaaaactagtttctactctatgtagacatactgccaccttgagatttcatgcacaatctagggggaaaaacttgatgataaatggagactgaggcaggagaatcacttgaacccaggaggcagaggttgcagtgagccgagatcacatcattgcactccagcctgagcgacaggagtgaaactctgtctcaaaaaaaaaaaaaaagttttcccctttcttcccttaccaaaaatcaatacacagcagtaactacttaccacaaatgcagcattttgaaaaattattttctccccatgcgtaatttgactttctcactaaatcatggtcctgtaacatgatctggtagggtactcaattaaaagcttcaaaaaaaaccacatctttgtggccctagtggcaccaaagtttacctggcaggctggtggcacgagagaacataatgtcgggaaaagcactcagggcggaggaagagattggaggtccagagatgctgaggagtgagaagttctccatattctgaccactgcgggggtacagag

SEQ ID NO: 441 - DNA, 2953 bp, Homo sapiens
tgattttcccaaacttcaagtattgtctttatttttaaaagagagaaaggggagggtgtgtgcctggtgttgctaggcaaccattagccaaaggtgatgagagccgggttctgggaaggacagcaggctgtgcggggtgacctcagactggacagaaggctgtgactaactttattggcatctctctagagacataagtaggcttcaccgccaatttgcctaaggtgttcagcaggactattgaaggcctggcagctgccggaggagagcctgtctcccagccgggccttctgctccttgctccagagggctttgagcttgcggtagtacaccttgcagctgaagccctccctgaagcccctcttgatgtggctcttgaggaagtccagggtggggtacatgcggcagcaggccacgcacttgtagccattctgctgtgctgggtgccacctggaagccattaggatgtcctgggatgtgatggagtccaggccatgcctggatttcttggtggcttctcgagggcaagtgttctctggggaggaagaggacgaacagatgttctcagccatgtcctcagaaaggcagttgtcccacttgccctcatcctgctgcacctctgggaagtcataggcctccagctggctctctttgtctgcacacacgaagtagctgtagggggagaaccagggccggtagatagtgcagttccgcctcagcttctctccgtgctgggtgtcccccaagctgcagtctgcaaaggaaaggaccaggtctgagtctctggcagggagcagtggagccaaggatgctggagcagaaaggtaagaaggcaaacatcaggcatgacctcggttacctccaccccaccacgattgcagttctgagagcagacgcaagacagtagtaagagcagccgagggcattccttctcactgcattctttttctaggggtacaaagggccgttggatcttggggcaggagaggctgcttttagttggtaagccttggtatttgtcgaggccttcccctcctggagacaccatgtccactgactcctctaaggatagacacagacaggtgacccagcggatagccaaaccggcggcctcccacagtccctcttttcgccacccatggctgtaacccttttttcagcctcactgctcatcttgatccctccacggcccactcagccagaaactgctcttgcacaccagtttcagagacaggagaggggaggcaaggcgagagccccaggcctgtgggtgtctaccaaaggaagaagggccagataggaggctgcaggtgacaagaccgcgcatgggggtccagcttccagacacctctgcttccttagggaagcagccccttttcatccttagcctctcacacattcccgcccagagtcagagaagtcctcacctggtgagagcactgtgttctgtatcccttgcctgacaatgatgctttggtactggggtggcagggcctgagctgggctggatgcctcagtgggtactgctgtctttgcaatgtctggggtatagaagaaacactggtgagctgagcaaggttgggattccactttctgggactcccccaggcatacctaggggctcaacctctgtacttcaaggcatctcaacgctgaaacagaacagtgacctctcaaactcagccaggcagagctattctggatgacatcctggggaattctgaatggggccatttcattcaggcctcagaaagatcctctggaaagtgggatttatgatgtagcccagatgacacctctccgcctggcctgcccctcatctaaccctcctgcatctcatcacgcggatggcttcactccgcattgccagtctcctgagcatcctgggacccagagtcacaggctgcagagcaatgttccatgcccgctttgaggattgtccagttgaaacatctcatacccacagtcagggttcctgtgggccatcactgcacggcacaccctggagtgctaacacttggacaaaaagctgacctgcctcaaatcccagaatagcagctgtgttcagtttgggggacaaatttataaatgtcatatatgtagacaaatggatgcttaggaggcctactccactgagcagtacttctccattttactgtgcatagggatcccctagggatcttgttaataacacagatgctgattcagtggatctggggtgggaacctgagattctgcatttctaacaagctcccagacgatgcagacgttgcaagtctaaggaccgtattttgaacagggagtcctcagggtgtccaactttattccatgatgtgctcatcagtttacgctgctgcttaggcttctctgatttggctaactccaaatcctctccaaacttgtcaaaacagagctaaaactagtttctactctatgtagacatactgccaccttgagatttcatgcacaatctagggggaaaaacttgatgataaatggagactgaggcaggagaatcagttgaacccaggaggcagaggttgcagtgagccgagatcacatcattgcactccagcctgagcgacaggagtgaaactctgtctcaaaaaaaaaaaaaagttttcccctttcttcccttaccaaaaatcaatacacagcagtaactacttaccacaaatgcagcattttgaaaaattattttctccccatgcgtaatttgactttctcactaaatcatggtcctgtaacatgatctggtagggtactcaattaaaagcttcaaaaaaaaccacatctttgtggccctagtggcaccaaagtttacctggcaggctggtggcacgagagaacataatgtcgggaaaagcactcagggcggaggaagagattggaggtccagagatgctgaggagtgagaagttctccatattctgaccactgcgggggtacagag

SEQ ID NO: 442 - DNA, 2953 bp, Homo sapiens; identical to SEQ ID NO: 441

SEQ ID NO: 443 - DNA, 2949 bp, Homo sapiens
  misc_feature (1153): n equals a,t,g, or c
tgattttcccaaacttcaagtattgtctttatttttaaaagagagaaaggggagggtgtgtgcctggtgttgctaggcaaccattagccaaaggtgatgagagccgggttctgggaaggacagcaggctgtgcggggtgacctcagactggacagaaggctgtgactaactttattggcatctctctagagacataagtaggcttcaccgccaatttgcctaaggtgttcagcaggactattgaaggcctggcagctgcggaggagagcctgtctcccagccgggccttctgctccttgctccagagggctttgagcttgcggtagtacaccttgcagctgaagccctccctgaagcccctcttgatgtggctcttgaggaagtccagggtggggtacatgcggcacaggccacgcacttgtagccattctgctgtgctgggtgccacctggaagccattaggatgtcctgggatgtgatggagtccaggccatgcctggatttcttggtggcttctcgagggcaagtgttctctggggaggaagaggacgaacagatgttctcagccatgtcctcagaaaggcagttgtcccacttgccctcatcctgctgcacctctgggaagtcataggcctccagctggctctctttgtctgcacacacgaagtagctgtagggggagaaccagggccggtagatagtgcagttccgcctcagcttctctccgtgctgggtgtcccccaagctgcagtctgcaaaggaaaggaccaggtctgagtctctggcagggagcagtggagccaaggatgctggagcagaaaggtaagaaggcaaacatcaggcatgacctcggttacctccaccccaccacgattgcagttctgagagcagacgcaagacagtagtaagagcagccgagggcattccttctcactgcattctttttctaggggtacaaagggccgttggatcttggggcaggagaggctgcttttagttggtaagccttggtatttgtcgaggccttccactcctggagacactatgtccactgactcctctaacgatagacacagacaggtgaccagccgatagccaattcggcggcctccacagtccctctttttgtcatccatggctgtaaccctttttntcagcctcactgctcatcttgatcctcccacggcccactcagccagaaactgctcttgcacaccagtttcagagacaggagaggggaggcaaggcgagaccccaggcctgtgggtgtctaccaaaggaagaagggccagataggaggctgcaggtgacaagaccgcgcatgggggtccagcttccagacacctctgcttccttagggaagcagccccttttcatccttagcctctcacacattcccgcccagagtcagagaagtcctcacctggtgagagcactgtgttctgtatcccttgcctgacaatgatgctttggtactggggtggcagggcctgagctgggctggatgcctcagtgggtactgctgtctttgcaatgtctggggtatagaagaaacactggtgagctgagcaaggttgggattccactttctgggactcccccaggcatacctaggggctcaacctctgtacttcaaggcatctcaacgctgaaacagaacagtgacctctcaaactcagccaggcagagctattctggatgacatcctggggaattctgaatggggccatttcattcaggcctcagaaagatcctctggaaagtgggatttatgatgtagcccagatgacacctctccgcctggcctgcccctcatctaaccctcctgcatctcatcacgcggatggcttcactccgcattgccagtctcctgagcatcctgggacccagagtcacaggctgcagagcaatgttccatgcccgctttgaggattgtccagttgaaacatctcatacccacagtcagggttcctgtgggccatcactgcacggcacaccctggagtgctaacacttggacaaaaagctgacctgcctcaaatcccagaatagcagctgtgttcagtttgggggacaaatttataaatgtcatatatgtagacaaatggatgcttaggaggcctactccactgagcagtacttctccattttactgtgcatagggatcccctagggatcttgttaataacacagatgctgattcagtggatctggggtgggaacctgagattctgcatttctaacaagctcccagacgatgcagacgttgcaagtctaaggaccgtattttgaacagggagtcctcagggtgtccaactttattccatgatgtgctcatcagtttacgctgctgcttaggcttctctgatttggctaactccaaatcctctccaaacttgtcaaaacagagctaaaactagtttctactctatgtagacatactgccaccttgagatttcatgcacaatctagggggaaaaacttgatgataaatggagactgaggcaggagaatcagttgaacccaggaggcagaggttgcagtgagccgagatcacatcattgcactccagcctgagcgacaggagtgaaactctgtctcaaaaaaaaaaaaaagttttcccctttcttcccttaccaaaaatcaatacacagcagtaactacttaccacaaatgcagcattttgaaaaattattttctccccatgcgtaatttgactttctcactaaatcatggtcctgtaacatgatctggtagggtactcaattaaaagcttcaaaaaaaaccacatctttgtggccctagtggcaccaaagtttacctggcaggctggtggcacgagagaacataatgtcgggaaaagcactcagggcggaggaagagattggaggtccagagatgctgaggagtgagaagttctccatattctgaccactgcgggggtacagag

SEQ ID NO: 444 - DNA, 2953 bp, Homo sapiens; identical to SEQ ID NO: 441

SEQ ID NO: 445 - DNA, 2953 bp, Homo sapiens; identical to SEQ ID NO: 441

SEQ ID NO: 446 - DNA, 32191 bp, Homo sapiens
  misc_feature (3624): n equals a,t,g, or c
  misc_feature (3648): n equals a,t,g, or c
taaaaactgtgacaatacctactcagccctaccaagatatagttactgcactgaaatgcagacgagaagacaaagaagtaagcagccatatacagtgtttactgcatgttgatagatttttgtatgtaacatttagccatttaatatcttcaacaaatatcagtatactgatactcagttttgaaccacaaacttcttttgtcctaccatcatccttgttctaaaaatatttttgttgccatctaatgaactattttatgcacttatgtaaagtacagtgagcccatagatttaaatatgctagttcctagttaaaaaggggtgaactttttttttcttggcagttatatactgttgttcagcacgtgaagcacttcaacgatgttgtagaatttggtgaaaatcaagagttcactgatgacattgagtacttgttaagtggcttaaagagcactcagcctctaaacacacgttgccttaggtaagatcttatttttatattttacaattatgtgcatgctgtattaaattttttcaactaggtgttgtccaaaaagccaaacattttttattttgttatgatggggtagtatgtatagccagtgatatgttaaaatgctatccatttctttataaagaatttgattctgcatgataagagggaaagctgggtgatgagagcctttttaatatagcataggcttcagttttcaagagcttaaaaaaaaaaaaaaattacgctaaagcatctttttgccttgtgtggtggctcatacctataatcccagcattttgggaagccaagttgggaggatcatgtgtgtccaagagttcgagaccaccttgggcaacatagtgagaccccatgtctacaaaaaataaaaaattaatgagtcatggtggcatatgcctgtagttccagctacttgggaggctgaggtggcaggatggcttgagcccgtgatcatgctgctgcactccagcctggatgatagagtgaggtgaggccctgtctccaaaaacaagaaagaaaaaattaccagaaagaaataaagtaaataattaaaaaaaaatcttttaagttctttttacctctgatgttcaagtaataagttagatttatttaagcatattgtgatctggacgcttacatttgtacccaaatgctcaaaaagatgatcttttgtatttcctaatggattgattgaatactataattttgattaaatttttcagtcatttggagtatatccaatcaaatataattaattaattgtgatttttatcagaagtattaatgaaaggcagctcagattttaagcttttaatggtggtagtagtaacgtaaggaatgcactaaagacaattacgttatttttttaaaatacagtgtacctaatcatgcactaggcatcagtatatttttaataatgtgttttgcctatggtttttatattgtgatcatgtatgggcaatgctttgacccttttacccccttcctatttgctggttttggtattacacaaactcaaaactaatgtactagctgtttccagcccccctaacctgctctattttcttgtagtgttattagcttggctactaaatgtgccatgcccagttttcgaatgcacctgagagcacatgggatggtagcaatggtctttaaaaccttggatgattcccagcaccatcaggtattttttaagtttctgagattgagaagccttatgttgaaaactactagtctatttggctatcaaaaatatcttcactgaatattctataaatatatcctaattatagattgagttcattttatttgctaaatttgtagtgcttatggccagaagcttttgcttaatacttattttatcatgaaaacgtgaaaacattttttcttaatgtgtcattttatacttttaaaattgtattttgttatcttagctaatgtagtatattgatacagaattttgtaagcataattttctctataatcagaaagcactgagaagaatcttttaatattatttgatactaatgaatggaaaaaaactggtttggaaatgcagccctaattttttagaaacgtttttgtccagtgttgaatctggaacatggcctcattgtgataaggaataatttcttcattttccttgcctttgatgcttttgcataatgataaacataacaaaagttattaggtttaacattttccaaaattagaagaaagtaaccatcattgctaattattagcattagtagtattttgagatggccttactatatttttgttaaagaaattatgttctaaatacagattaggtgataattaatttaatactgcatcttctgggctgggcgcggtggctcatgcctgtaatcccagcactttgggaggccaaagtgggcagatcatctcaggtcaggagtttgagatcagcctggccaacatggtaaaatcctgactctactaaaaatacaaaaaattagctgggtgtggtggcaggcacctgtaatcccagctacttgggaggctgaggcaggagaattgcttgaacccgggaggtggaggttgtagtgatctgaggttgtgccactgcactccagcctgggagacagagcgagactctgtctcaaaaaaaaaaaaagaagttagtttgttgctgggcaaggtggtgtgcattcgtaagtcctagctactctggagactaagggaggatctcttgagctcaggagttcagatccattttgggaaacctagtgagacctcatctcttaaaaacaaacaaaaaagagaattcgtttgctttgttatgcagttaacagtgaacttagacattacagtgtgatttttaagggcagtggatcccccatggcctttacaatgcatcctaatttccaaaaataatttgctgtataaacatttaatcagacacctggtctgatgcttctctacttctgggggctcaaagtttaaatctttagatggttgtgttttctgtatattgaaataggtttaagtacagaatatctcaagtgttggaatatcccaaatgtaagacctttttttatattcacatttatctaaaatatttcaccttcagtatttagattgtgtaagtagagtgtcctggccaggtgcggtggctcatgcctataatcctagcactttgggaggctgaggtgggcagattgcctgagtttaggagttcgagaccagcctgggcaacatggtgaaaccccatctctactaaaaatgcaaaaaattactcgggcgtggtggtgcttgcctgtaatcccagccactcaggaggctgaggcacaagaattgctggaacctgggaggcggaggttgcagtgatctgagatggtgccattgtactccagcctgggcgacagagcgagactccgtctcaaaaaaaaaaaaaaaaaaaaaaaaaaattatttggttcaaccagacttgattgttttattttattaagcgatcctcacaactcaccctcccaagtaactgggactacaggctcctgccactacgccaggctaatttttgtattttattttattttattttatttattttgagagagtcttgctctgtcgcccaggctggagtgcantggcacaatcttggctcactgcancctctgcctcccgggttcaagcgattgtcctgcctcagcctcctgagtggctgggattacagaggtgcgtcaccatgcccagctaattttttttgtatttttagtagagacagggtttcatcatgttggccaggctggtctcaaactcccgaccttaggtgatccacctgcctcagcctcccaaagtgctgggattacagacgtgagccactgcgcccggcctaatttttttgtatttttaatagagatggggtttcaccatgttgtcaggttggtcttgatcaccttacctcaggtgatctgcccaccttggcctcccaaagtgctgggattacaggtgtgagccaccacgcctggcgattggtttattttaaagaaatccaaatatgtatatttcagcatcctgggtttatatacagatgtaaacacagctgtgttttccaggggaaaaaatgtgttaagggtatgatatagatttaaaattattatttaaattattgattttaaactgaaatatgactatctgctgtatcataaagaataggctgggcgtggtggctcacgcctgtaatcttagcattttgagaggccaaggtgggtggatcatttggcctcagagtgttcaggaccagcctcggcaacatggtgaaaccccatccacaaaaaatacaaaaatatcagctgggcatggtggcgcctgccggttgtcccagctacttgggaggctgaggtggggaggattgcttgagtccagacggtcaaggctacagtgagctgatatgtgccactgcagtccagcctggatgacaaagtgaaaccctgtctcaaaaggaaaaaaaatgaggtatatcataataaggtttttatatatatatactcacacacacatatctgcaaaaatgttttataaactcttagcatagtatagcctaagaaatatgtaactcagcatatattcttagagctatcaggcattcatatatggaggatccattgaaaggtaaattttaagcaacagcattttatttttttaaacatgtttcttcagaatatttttagagaggggccgggcgtggtggctcacacctgttatcccagcattttgggaggccgaggtgggcggatcacgaagtcaggagatcgagaccatcctggctaacaccgtgaaaccccgtctctactaaaaaaatacaaaaaataagctgggcgtggtggcacacaccagtagtccgagctactcaggaggctgaggcaggagaatcgcttgaacctgggaggtggaagctgcagtgagccgagattgcgccactgcactccagcctgggcgacagagtaagactccatctcaaaaaaaaaaaaaaaaaattttttagagggaccgctgaataaaacgtttttgaagtttccaacatggttagtaatataagttttaagcattaacttgtaaacaaaagtcattaatagtcttatttcctgagatgtcaggagttgcttacatgaagttttttttcttttctttttttggcctgttgaagaatctgtccctctgtacagctgccctcatgtatatactgagtagagatcgtttgaacatggatcttgatagagctagcttagatctaatgattcgacttttggaactggaacaagatgcttcatcagccaagctactgaatgaaaaagacatgaacaaaattaaagaaaaaatccgaaggctctgtgaaactgtacacaacaagcatcttgatctagaaaatataacggtgggttccttcttccttccttctaagatgagaattactttcagaaagtctttggttagttgcagtagctgtgtgactgtgggcaaattattttaattctaaccttggtttacagtttggcaaatttcttatgtttagatctgagcataatttcattccttgcctgaacttcctaaactagtttatctgtatttaggctttttgcccaataaatagttgcacattttctgttgcattttgtctaatccttttctctttattttttaagaaaaaaaaggggccgggcacagtggttcatgcctataataccagcattttgagaggccaaggcaggtggattgcttgaacctgggagtttgggtccgtcttgggtgacatggtgaaaccccagctctgcagaaaatacaaaaaaatcagccagatatggtggtgtgcacctgtagtcccagctagtcaggaggcttaggtcagagaaatatcctgagcccggggagtttgagggtacagtgagccgaggtcgtgcccctgcactccagcctgggtgacagagtgagattgtctcaaaaaaaaggtagaaactacatgtatattaggaattttgaattcttattctccatggatttcagggataaacatttcagaggatttacatccaccattttcttttttaatttttattttataataatagtaataattactgttttttgagatagcgtcttgctctgttgcccaggctggaatgcggtggtgcagtcatagctcactgcagcctcaaacccctgggctcaagtgatcctcccacctcagccccccaagtagctggaactacaggtgtatgccaccatatctggctaacttttgtatttttagtagagatggggttttcgccatgttgcccaggctggttttgaactcctgggctcaagcgatcttccttcagcctctcaaagtgttgggattacaggcgtgagccaccacccccgccataactgccttttcaatgagcaagcatctatttatcccagagtacctcagggtgtctaactgcttcatgggacttgaagaaccctgaagacaccacaaggaagattcctaggcacctcacctcccctgaggtggtgttccttataatacagtcatggccagtggctgctcttaatgctcatcacaatgccccatgtgtgagatggctattccatttttgctttagttcagttttgccttcttctggctttttacttgtagaatcaatatgttccattcacatattggtgattccatccacttctaggccagtagaagataattggcctgtggttttgaaaaaaaagaaaaaaagaaaaaataagtgtttattgtataataacctggttttcagacatttccaacatcaaaactctataaacatttattattgtctactgttcacaatggacaagtccatgcaaatgtacctccagagtccaaggaagctgagaggccaaagagtctgataaatccagttttttagaaagaaacatttaatagggacttaggaacaaaagccgtatctgtgtctcgggatccccatgccattacaccccacatccgggatttatatgctatatggaaagcataattcagaatggatgtgtagggctattgcagtgtacatcaaggttgtttgacataagggcaggatatacagtaagtacctgattttacactaggatcaatgggtaaactggaaattttagaggctttcccagaacagatgttaatcagaagccaggctgggcggtgtggctcacgcccataatcccagcactttgggaatccgaggtgggtggatcacctgagaccaggagttcgagaccagtctggccaatatggtgaaaccccatctccactaaaaatacaaaaattagctgtgcgtggtggtgggtgcctgtattcccagctacttgggagtctgagacatgagaatcgcctgaacctggaacctaggaggcgaggcggaggtttcagtgagccgagattggcgccactgcactccatcctgggcaacagagcaagactacgtctccaaaaaaaaccaaacaaacaaaagacaaaaaaacaaaagccagtgtctccacatctacttaactgaagactgcagcatgtgccacaaaaatttataggatgctttgtgctagccagatgtgacttaggctcttgctctattctctattttaattaaggtagaggtggtaatagattctggttatggtggaggatgggagagcaatttaactttaaacagcaagatacaaaactgacatgtattcagtacttttcactttataagattgtggagagaggtgttgtgcccagatggcaaatcaatgatcctccatgtcatcacatcgtctgtatgctacatgtaaaacttttttttgtttgtttgtttgtttttttgagacgaagtcttgcccctgtcacccaggccggagtgcagtggtgtgatctcggctcactgcagcctctacctcccaggttcaaatgattctcatgcatcagcctcttgaatagctgggattacaggcgtgtgccatcacgcccagctaattttcttgtatttttagtagagacagagttttgctatgttggctaaactggtctcgaactgaactcaggtgatctgtcctcctcggccttcctgggattacagacatgagccactacgcctgtccaaaacatgtataatttttatttacttctgtatttttgcagtgtctactgatttttttcatgctataaaagaataaatttgagcctatagtttttatttgcctgcatagttggatgaatatgactttatttttttgtcttctatattcaacatttagattcatttcaggtatgctgttaaataacatgataaacttgataattgaatttgtcttatgttttgttgaatttattaggatgataaataccagaataaaaactttcctacactctattaaatagtttactcatatgattaagccagagcacacttgtcaattttaggattcctcttttccccactaatgttagctgtccttgaatatttttgttttaaattgtacagtagatttactgtgttgttttgtacaatgaatatcctttacacgtttttgttactagttgcttaatttcttgaatatattggtatggctgatgtgccatgaaaagataatttaaaatagtaatatagtcatgctttgcttcatgacagatatgctctaaaaatgcatcgttaggtgattttgttgctgtgtgaacatcagagtgtacttacacagacctagaagttataacctgccacacatctagactatgtggtacagcctgttgcttttaggatgcaaacctgtatagcatgttactgtattgagcactgaaggcagttggaacacaatggtggtaaaatttgtgcatctaaacataaaaaaggtacagtaaaaatatggtataaaagatttaaaaagatacacccatatggacacttaccatgagtagagcttgcaggactggaagttgctctgtgtaagtcagtgagtgagtgatgagtgtatgtgaaggcttaggacatgacggcacactactgtagacttgataaacaccatacactggctcccaaagtttaactgttgactcttttttaataacacttagcttaaaacacaaattgtatagctctacaaaaatattctgtgagcttttttctgcttttaaaattattattttttaacttttaaaactttttctgttaaaaatgaaggcgacacacacacgttaaccaaggtccacacagggtcaagattatcaatatgactgtcttccacctccacatcttgtcccattggaaggttttaggggcagtaaaacaggcatggaggtgtcatctcccttgataacaatgtcttgtcttggaatacctcctgaaggacctgcctcgggggtcccccccactgccttgaaactctctggctctgtcaacctggctggagtgcagtagcacgatctcagctcactgcaacctccactttctgggttcaagtgatccttgtctctcagcctcccaaagtgctaggattacaggtgtgagccatcttgcggcctgttcctcttattttctgattagtgatttggctgtgctttaattctgagtactattccagttttcaaataaaatgcttgattagtaggctgtttttaaatgctagcttatagtatactgactatagcctaaaatatcaaagaatcctttttatgccaatagaaacaaaaacaaaacttcctaaaaaggctcgagttttaattattaatatcaaattaccatcacctttcttctaaacaaagaatgcctcattaggcttcagctttgcctgtatgactcatgaattaacacacacgaaccagtctaaattactctttgagggacagaatgaaaaatgggcacaattgtatctgtttttgtggtattggattctagttctatatttgtcaccttggagaacaactcttttttttttttttttttttgagacgggatctcactctgtcgcccaggttggagtgcagtggcacaaatcttggctcactgcaacctccacctcccgggttcaagcaattcctcctgcctcagcctcccgagtagctggaattacaggcacccaccaccacgcccagctaatttgtgtatttttagtagagatggggttttaccatgttggccagactggtcttaatctcctgacctgaggtgatcagcccgcctcggcctcccaaagtgctgggattacatacaggtgtgagccaccgcacctggccgagaacaacttttttaaaagaagtagattaaaatcttctagatcttttctaaatgtgcagtcttaaggttttcactggtaatatctgttatttgtatttctaaatatctaatttatgtgcatttttcaaatagacctgaaggacttaatgtaaactctcatcttttgaaggggagaaacttagggagaaaaaccagatcttgtcagtctttgctagttaaagcatttcttttgttatgctgaagttctttattgcagcaggaaccaaattgctctttgttgggaagtggctgtctgctttaaaaagaaaaacaacagccaaagtgaaataaagggcaataaaaactttactcaggttgtgagtgtggctcttagcttttgtactcttctggtggtggtcctaaagcattatttgtatacagttttgtcatcatggccacatgatgaatatctgagctgctaagcccgcagtatgccctttaaaaactagtcagtctgcaacactaaagtgaacaaaggatttgtatgcagaatagacaaaatacaccaaataataagaaaagacaatcagtcttgcaggaaaatatggaaagaataatgaacaggagtctcatagtagaaacatagttaatatgtgaaaaactgttcaaggttactgtcgttgtaaaaatacaaacaaaagcagtatgttaccattttgtaccctcagacaaaaatgttaagtgataacttgtacttttgaagattcagggcaactggcactcccacactttgctcctgagagtgttacttgttaaatccattgtggtaaattaatccaatattgatttacagttaaaaaatacatgtaccctttgacttagcagttccacacttgacctgtatactgtagaaataagagtacctatatatatgtataatattaaactgacaaatgatagactaatagcacattttctctatgaaaagctggttaaaaaactttgttcaatgtggactattctgataaaattgaaaattagttcaattttatgtataaaagtggtgttaaactacatgtagcatgcagtaaatttttgtaaagagaaacaatttctagagttattgctaaaagttgatattcattaatgatgcttctggtttttagactgggcatttagctatggagacattattatcccttacttctaaacgagcaggagactggtttaaagaagaactccggcttttgggtggtctggatcatattgtagataaaggtatgatatttacatttagaatgtttttatatattatttaaagcctgaagaaaatactccattgacgtacttcaaaaaataattgtatcagtttggaaatgtctattatcattattattttttagttgcatcctgcaaatttctaacatttaaagaagaggccggccgggcacggtggctcatgcctgtaatcccagcactttgggaggccaaggcgggcggatcacctgaggtcgggagtttgagaccagcctgaccaacatggagaaaccccgtctctactaaaaatacaaaactagccaggcgtggtggtgcatgcttgtaatcccagctacttgggaggctgaggcaggagaattgcttgaatgtgggaggtggaggttgcagtgagccgagattgtgccattgcactccagcctgggcaacaagagcgaaactccatctcaaaaaaaaaaagaagaggccattaacattttgatattgggggattatggaaacaaaataattacagagtatgcatttcaaaatctcacagtatgaaacctagaataaaaaatgttcagagaggttccagcatgttcatagcgtgtgtacagatggcttctaatgttagctaaaagtattctattggtaagtatcgatgataaatactaacttacgtttgtttcttttcacctagtaaaagaatgtgtggatcatttaagtagagatgaggatgaagagaaactggtagcctcactatggggagcagagagatgtttacgagttttagaaagtgtaagtatggatgactatttggcaaaaattattcagtcttaattgtgattgtgtgtgtaagagagagactgccaaatattttatatacccctggaggttcacttctgttaatccagatagaaatagcagtacattttttgagcaaccagttgttaataaacaagctaaatgagtagttttatattttaagagtacatgtattattgctgcaaatgaaatgttaggcttgtttgtttacatatgccaatcttttttaaagattttattatttttattattattttttgagccagagtctcactctgtcacccaggctacagtgcagtgacatgatcttagctcactgcaacctctgcttcccgggttcaagcaatttcatgcctcagcctcttgagtagctgggattataggcatgtgccatcatgcccttctgatttttgtatttttagtagagtcggggttttgccatgttggccaggctggtctcaaactcctagtttcaagtggcctgccggcttcagcctcccaaagtattgggattacaggcgttacactttgctgggcccctccaatctttattgttttttccttaatgtgaatttctacttgactacattgtttgtagataacaatagtgaaatgcaatcaggttttatttttaaattgttattagcattttgtttatttgacttttatttgagtcagattgtttataggcatggcctgtcataatatttggctttggagaatgatactgttgaactgcagcgagtatattttgttctttgactcttacgaaagacttaacccagttccgtatagattagaatttatactgccagctaatttcaggatgcataggtttgttcaccaggttattttaaaagtagtatagtataaattaaaagctcctggcatagattaaattgtagcgttccatgtgtcttctagagtgctttgggcacagtagataacagatacttctttgtaaaaatgtgttctaaatgaatctacttatgaactttacgttatttgtaagttgaggactgctctattctgacattcagtgtgtttggcaattcgttacagtgaatatgtagtgtagaatatgttaattatgaatgaatataacagtgatgtcttaattttttcataaagcattagctttcttattttacacctggaacctgtaggttgtgaaattattccctttggtaacaagggctgtttcttcctcatctttgtatcttttacgcaccaggcagaatgtggtgttacatgaatgaatgaaagttttggattgccacaattatttcatattcttcctttttaggtaactgtgcataatcccgaaaatcaaagctacttgatagcatataaagattcccaacttattgtttcatcagctaagtaagttttttgtttattagttaacaactaacattgttacttattttaaacatttggattgaccataaatgaaagaaatttggattagcttcctccatgaaatgctctgttgagttctgtgaattggttcacattgtgtaacaaaagttttaagagtacagattttggacacaaaatgacagtgtggattccagcttgataatttcagctgtataacttttgtaatgtacaaatcaagctctttacaagggggataataatagtggctaacccacctaggatttttattacagtaaaatgagttaatttgtatgtttgtaagaaatatatacatagtagatatttaaaaatatgtgtatattaaaaatacatataaaaaatttaaatttaaatgatttttaaagtatcttttgtatcatttgtgatacatattaatgagttaaattagttaatgtgcaaagcctagaacagtacttggcgtatagtaaatactaagcatttttcctcattcttgttttaaatggacttttctctgttcttctgcactttatttagacctgtttttctatatctgtatgtagcttcttccattccacatttatttcttcccacatttcatcacaattaggctaatgctgtcacctccttgcaggtaaaattcccaagtatgtctccagtcctggttctgtcttattacagcaacctcttcctgatatctctgtcctagttcttgatatctgccctagttctctggcctttagcctatccagaacaataccacatggagttaactttctccaaatcgctgctttgaaaaaataattttaatttctcaaatctctgattccttattgtctttggatatatgtacaactttcttattgaagtcagccttatcaaaggcccattgcagtcttactctagtttatctgttttttaacctcttattttggaggaattcaaatataaatagtgtaataaactgtaatgtacacattatcaatcatggccagtctggtttccatctgtaacctcatccattccctctcctgtattatttgaaacagatccagatattatttcgtccataaatacttaagtacataatgcctagaagaaaaggactcttttaaaaaatataaccccagtgccattttcatgccacacattattagttgcttaatattttatgtttagtcaatattctaattttcagtagtctcaaatttctagtctcagtagattttcttaatctgtaggtttttaaaatctcctttttttgtcttggatttgtacgttttgtatcttgcatttgtatattttatttttctttattttattttatttttttttctgagcccaggctggagtacagtggcatgatctcggctcactgcaacctctgccttctggattcacatgattctcctgcctcagccttccgaatagctgggacaacaggtgtgcgccaccacacttggctaatttttgtatttttagcagagacggggtttcaccatgttgaccaggctggtctcgaactcctgacctcaggtgatccacccgccttggcctcccaaagtgttgggattacagatgtgagccaccgtgcctggcctattttatatatatttagcactctcttttttttttttttttttaatagatacagggtcttgctatgttgtcccagctggtctcaaactcgtgggcttaagtgattctcctgccttgacctcccaaaatgttgggattacaggcattagccactgtgcattgcctgtatttagtgctcttaccgcatgcattctggttgtttgctaccatgtttttacccttccttaccaaagattattgaagttaaatgtttctgatttcattttcttttttaaattaagaaaaattgtgtatgttgtttctgatttaaaaatatctcttttgtatacttcataacctctgacaactaccttgtaagaggaagtatttgatatgacaggtgctcttttgttgtgattaggaaattcaggccaaatgtcttggaagtggcagtagaggtcagaattgagtgtttgtaaaagagcacttatctctaggtttttaagcttttcagcagaaaccatgatcaattcggagatagcatacagaaagattaaataacatatgctgaacctccttttgtcttcaaagccccagtttagcccagcctgaaaacagttgagttaccagtgacagtatggtaatcctgaccagcattcaataccagaagaacaaattattttaggttagacatgaggaacaccttcctgaccaaagggttgtaaaatattaagaacttttacagaacttcctcagtatgttttaaagggcaactaggcgtagattagatacggtttctttaagaattttgtgtgatatataatgcatgaagaatcaactgacagagtgagcttacttgatttgtattaaacttaaaaatcgtggacttggtgatttaaatagtgtctttagaaatactagacccattagggattatatttccttgttattttgggtagtatcttgagaatcctttttttttttttttggtatcataaagtttttaatgacacacacattttgtcctttaccttacaaatatttctttgggttttattctgatcatcatgcaatatacagaatagtttcttgccattaccttattagggtagaaccacctttgcaactttggacaccatttagtagacgtgaaatggaatatagaaagatagaatgcttgaacaaaacctctcagtgctagctgccttaactaaggtccttctctcagcttagtacccctgtgacagcttgcaagacactctgactttgttttattgtgcttatgtagtcagattatgaggctgatcattgagtgtccatcagactctacattattgattcctctctcaagttgccccaatatcctttgtggccagaggaagagaaaaacattcaactagtaaatccaatttctcttgcgaaaaagactcatagttctgataaagagtcatttcaatacctgtttcaccatttagaaaacatgtttctgtttgtatagcacctctgggaacctaatgcagtaatatcgccttcttttccatttgtccctgatctagatgctatattttttatgcaacccacctgctgttaagtattttacaattatagatttacgctctatcttttattctgtcccatctcaccctgctagcaaatttttatttgttttctttttttctttttttttctttctttctttttttttttttagtatttattgatcattcttgggtgtttctcggagagggggatttggcagggtcataggacgatagtggagggaaggtcagcagataaacatgtgaacaagggtctctggttttcctaggcagaggaccctgcggccttccttgtgtttgtgtccctgggtacttgagattaaggagtggtgatgactcttaacgagcatgctgccttcaagcatctgtttaacaaagcacatcttgcactgcccttaatccatttaaccctgagtggacacagcacatgtttcagagagcacggggttgggggtaagtttgcagattaacagcatcccaaggcagaagaatttttcttagtacagaacaaaatggagtctcctatgtctacttctttctacacagacacaataacaatctgattttcttttccccacatttcccccttttctgttcgacaaaactgccatcgtcatcatggcccgttctcagtgagctgttgggtacacctcccagacggggtggcggccgggcagaggggctcctcacttcccacacggggtggccgggcagaggcacccccccacctcctggacggggcggctgccgggcgggggctgccccccacctccctcccggacggggccggctggcccgggcgggggctgccccccacctcccggacggggtggctgccgggcggagacgctcctcacttcccagaccgggcggctgccgggcggaggggctcctcacttctcagacggggtggccgggcagagacgctcctcacctcccagacggggtggcggtcgggcagagacactcctcagttcccagacggggtcgcggccgggcagaggtgctccccacatctcagacgatgggcggccgggcagagacgctcgtcacttcccagacgggatggcggctgggaagaggcactcctcacttcccaggctgggcggccgggcagagggcctcctcacatcccagacgatgggcggccaggcagagacgctcctcacttcccagacagggtggcggctgggcagaggctgcagtctccgcactttgggaggccaaggcaggcggctgggaggtggaggttgtagcgagccaagatcacgccactgcactccagcaaaaaccagtcaggtgtggcggcgcccgcctgcagtcccaggcactaggcaggctgaggcaggagaatcaggcagggaggttgcagtgagccgagatggcggcagtacagtccagcctcggcttggcatcagagggagaccgtggagagagagggagagggagattgtggagggagagggagagggagagcgagaatccttagatgtagctcatccccttggaaaattgtcgaggagacatgtcaatttgaatgaacttaaattaaaaaataatgatttatactgtcaacgttggtagtgaaggtaataaaaataatgatttgctctaatgcgtatgaaatatttaatacttgtctttacattaacatttgttatgtagtaataacatttactacctcagaagtgtccaacattagctgttaaccatttgccctgtttgagaaagggttgtggtctgtctcttatattggagagatcaataacatgcgagacaatttggaaataaagagattactagtggtaaatgtagatagtacagatataaacttctgccataagtttttaattttaacattccttgaataagttttttaaggtatcagatttttccaaaataaagtgaaatttcatccgatagcctttaggttcaagtaaatagaaatttgctgtgtacctattattatttactataatagtctatattttatttccttttaagagcattacagcattgtgaagaactgattcagcagtacaaccgtgctgaggacagcatatgcttagctgacagtaagcctctgcctcaccagaatgtaactaaccatgtaggcaaagcagtggaggactgcatgagggccatcatcggggtgttgcttaatttaactaatgataatggtaagatttttttccatttttttctcattgaaagatgtatattgcatgtgaaaacaagttatttttgtttctccttttcctggggtagtgatttttttatttgtcataatgtacttgacttactcatgtgtaggtttaaattgcttttaagagttgatatttttagaagcctagtagcttgacccagaagtatcaatagtatgtttcaatagaggaatgactatacaattctaagttaatatccatgttaataaatctccattattagtgttctaaggaagaatcagtaaccattttcctgtatccatttcttatttcagagtggggcagcaccaaaacaggagagcaggacggtctcataggcacagcgctgaactgtgtgcttcaggttccaaagtacctacctcaggagcagagatttgatattcgagtgctggtaagttgaaatgactttttcagaaatgagtatcatatctaataaggtgtgcaaaatgttaaccttagtttgggtttaagaaccaaccctttaatatattgtgggttttttttcatgaatttccttatgaacttactgtgtgtgtttcttttttttttttttttttttttttttttttttttttttttttttttttttttttgggagatggagtctacagtggcaacatcttggctcactgcaacctccgcctccctggttcaagcagttctcctgcctcagccttccaggtgctgggactgtaggcatgtgccaccacgcctggctaatttttgtatttttagtagagacggggttttgccatgttgccaaggctggtttcaaactcctggcctcaagtgatctgcccgcctcagcctcccaaagtggtgggattacaggtatgagctattgcgtctggctgaacgtacttcttattgtgcaaaagaaagccatgaaaagaccctatgtaaaaataaaaagtacgaaagctaaaattggcaattaaaaataaaaggaatgattctttgggaaaatcggtggtttttttgttttgttttttttgttctttttttgtttgtttttgagatggagtctcactcactctcttgcccaggctggagtgcagtggcacagtctcggctcactgcaacctccatctcctgggttcaagctattctcctgcctcagcctcccaattaggtgggattacaggcatctgacaacacacctggcttatttttgtatttttagtagagatggggtttccccatgtttgtcaggttggtctcgagctcctggcctcaagtgatccacctaccttggcctcccaaagtgctgggattacaggcatgagcgctgtgcctggccttttttcttttttttttttctttttttctttttggcctttcatactggtttttagccattttgtaggtggtagaacactgatattcagctttttagttgccattaaaaattgtgtatattgtgttcatttgttttaagtactcatctctgataatatgtgtcttttaaactttttgaagggcttaggtctgctgataaatctagtggagtatagtgctcggaatcggcactgtcttgtcaacatggaaacatcgtgctcttttgattcttccatctgtagtggagaaggggatgatagtttaaggataggtggacaagttcatgctgtccaggctttagtgcaggtaagcaaccactttaaaaacaaactcataactgcagtttgttggatttgtccaatttcttttatcatttgcaccttttacctccttttcttgcccatccactgctggccctctctgcccctcccccggcctttttagttagaactcctgaagcatgtctctgctggggtagaaagggactgttttacacctgaccaatttttaaatattcacagcgtctagggtgaaagcttattttaaaccagaatttgtaaccaattaaaaatgtggtataggctgggcgcagtgactcacgcctataatcccagcactttgggaggctgaggcaagtggatcacttgaggtcaggagttcaagaccagcctgaccaatatggtgaaacctcatctctactaaaaatacaaaagttagccaggcatggtggcatgcacctgtaatcccagctactcaggaggctgagaggcaggagaatcacttgaactgaggaggtggaagttgcggtgagccgaagtggcatgtcactgcactccagcctggacaacagagcaagactctgtctccaaaaaaaaaaaaaggtggtataatttctctgtagatcagtaagaggtacactgcttagaatgcattcttactttattttgctgattttttttcgactgttataatcactccttaagcattgttaccaaaaagcagagacaaaggcacatttgttctattaatgaaattgggtgcagtggcttacgcctgtaatcccagcactttgggagactgaggtggggaggatcacttgagtccaggagttcaagaccagcctgggcaacatagtgagctcccatctctattaaaaaaaaaaaaaagtcaagaatccaggcccatcacatccacttcgtgtcctctagtatttatttactcgtctgatctgtgtccagaactttgaccttatggaccacagaaaactggaagtcctttgtcacctgttcccttacccagtctggaaagtggcaaagtagccgagcatgggaaattgtgaatgagagtgtttctttgagccatttaaagtcattttttattatcctcttttgttctctattatgtgtgattgaatgttgactatagataagaggtagttaatccctaggcttttcttcttagactcagaatactccgttttgactagccttgaagttttagtttatttaaaatacaaaattaaatgtgaaactagtgatagattatcattacttatcagtaacagtaatagtaaatggtagtagtaatttactatcaatagttgataatagactgcttttagtctccagataccatttagagatttcatttaatgcaaaaaacatttgaaaatgtttggcacctaccgctttgatcccattgacaacatttatttttctgctaaatgaagcatttcttggccgggcaaggtagctcacacctataatcccagcactttgggaggccaaggtgggtggattgtttgagctcaggagtttgagaccagcatgggcaacatagtgagatcctgtctgtacaaaaaataaaacagttggttgagtgtggtggtgcatgctcatagtaccagctgctcgggacgctgaagtgagaggattgcttgcacccaggagtttgaagttgtcgtgagccgtgattacagtactgtgctccagcctgggcaacagagtgagaccctgtctcaaaaacgtttaaaaaaagtattctttttttctgttcagtagacttgtttttaaactttttatttcaaaatagttatagactcacaggaagttacaaaaatagtacaaagaatccctcccatttaccctttacctaacttcctcaaatggtgacatcttatataactgtagtactatagcaaaaccaagaaattgacattagtacattactgttaactgcactttagaccttattcagtttcaccattttcatctgcattcatttatgtttgtgtgtaacatatgtacctctgttcagttttattacgtgtatagattcatgtactcaccactacattgagatatagaaccgtcaccataaaagaattcccttttgctgctcactgtacagcctacctgccctccctgtctcctagctaccaccaacgtgttttctatctttttccatctcttgttttatttttttctatcattctagtctctttcttttaaaaattgacttttcttcaaatggaacctagaaatgaataaaaacttaccgtcagtcgcctcaggagctgtgtttgaaggcacagatgatagatctgcattatccacataataggggttcatttgcagaagccatccccacaccctcagagatccctgtttgtgagttgtttcagggatagtctcaaattttcctactgtgtctaattgacctgggaatatcacttccagtattcctcttttgcacttagtgttatagaagcctcttgtccttcagggtatcatcctatatcttctctgtctttcttttatctgctatggtttatggtttgtcatttttaaatcagtttaaagtttttgtttttcaattgtaataccttttgggtgatgggttctgttactcattttagaaaattgtgctgccttgtactcacatcagttaccttaaagtgtcaagaaatggctcttaattctgttattcaaagatagagtggaaaaatccatgttcagatttatatcgtttatgctactgataacgttggcctgaatccagtaattttcaaattacgtatcttttcgataatgttgtataaatggaatcttacaggtagttctgattactgacatgaactttcctctttctagctgttcttttcttacctatttatggatctgtttattttttaaaaaccaaacataattcacatacgtagtgggggaaaaaaagtcagatccagaaaggtttaaactccacagatctatttcctaaaacgttaccatttgtaatagttttgtgtttgtcctgagaaattagtgtttatgcatatatcaaaataaatgtgcaggccagacatggtggctcatgcctgtaatctgtaatcccagcacttggggaggctgaggcaggcagattgcttgagcccaggagtttgagcctggcctgggcaacatggcaaaattatgtttctactaaaaattaaaaaattagccaggtgtggtggcatgtgcctgtagtcccagctatttgggaggctgaggtgggagaatcacatgagcccaggaagttgaggctgcagtgagccatgatcctgccactgcactccagcctgggcaatgggaataagaccctgtccgaaaagtaaataaaaaaatgtgcaatgtgttttatataaatggactcttactgtacatagtatttagtctatacccactctttgcttaatgtgtcttcctgagctcttcatgtcaacacgtaggttcatcacattctttgtaatgactgcaaactagtagctttttgatttatacatacatacatacagggtctcactcttttacccaggctgaagtacagtggtccagtcacagctcactacagcctttacctcccaggctcaggtgatcctttcacctcagcctcccaagtaggtggaactacaggcacatgccaccacgtttggctaagtttcgtatttgtagagctgaggtctcaaactcttgcactcaagtgatcctcctgctttgtctcctgaagtgctaggatcacaggcatgagccaccatgccctgccttagtactttatttaaccaaacctctactgatacactttttgatggttttctgtttttttaagttttattttgttacaaaaattacagaaataaataccatagcatctaaatcttaggccatacttttcttttttttaaatttttttggagacagagtcttgctctgtcgtccaggctggagtgcagcggcaccatctcagcttactgcaacccctgactcccaggttccagtgattctcctgcctcagcctcccaagtagctgggattacaagcttgcgccaccacgcctggctaatttttgtatttttagtagaggtggtttcactgtgtttgccgggctagtcgccaactcctgacctaaagtgatccgcctgcctcagcctcccaaagtgctaggatttacaggcatgagccaccctgcatggccaggccatacttttcaaagtatgtctgtgggcataatttcctggtttaggaattgtgtcagaatatattgtactgtatttaaagttgatatgcctaactcctcccaccctcatcaccaaacacatacttcctgtgcccttaatttatacttccccctaaaactttttttttttataagagtccccattctttcatactcttgccaagatttttgccagtctaacaggttcctggatgtttttggtatttccttaaatggcattttgtatatgtccagaaacagtagtggttcattctttttatttttccaaagcccttgctgtgtttagcttccttttttggccttttcaaaagcagtaatccttgaagttgtgtcttcagagtaacctgtaacccccaacaactcagttcttcctggagtcataagtaggagtccatcattctcttctaatacatttttatctcagggcttgaaaattattgggaaatccagagagcttttgttgtttatatgtgctttatctgtctatatttactgaattagaaattgaaactgggagacattacattagctgttagagcagtgacataatcacatggcatgtagattccaaaactccactgtgcactcagtgaaagaagaaacaagtcagcagaccccttagtagtagtatgagtgtaattttgacctcctttactccctgatagggtcttaaggatccgtagggattcttagaccaattttgagaattgctgctctctataaagtttaatttttattttctgaaagatattattttatataatctctctttgaagtttgtataccactcttctgtatactcaacaaatctttgaggtctacttggcatttgattttcaggcaattctttctagtaacttggagcatttcccaaattgtgtcagtgttttttctatgtgtcagtactataccagcatagggaaaataaagtaagtgaaggcaaggaatttagcatattcccttttgacttaagaattttccaattttgtatttttttgcttgaatttcttgtattatgcaaattaagggaaattattgagactcattcttgcatcattattagatgacttcattgaatcttagcagcatttatactttcgttttggctttcagtagggtgtagagcaaaagcttttacttatactcacctctttttatcacataaccatcttagagttagtgatagatttaaaagcaactataactttatatttgcatatatgcatattgattggcaatctctttttaatgatcttcaaaaataatttttatcagctattccttgagcgagagcgggcagcccagctagcagaaagtaaaacagatgagttgatcaaagatgctcccaccactcagcatgataagagtggagagtggcaagaaacaagtggagaaatacagtgggtgtcaactgaaaagactgatggtacagaagagaaacataagaaggaggaggaggatgaagaacttgacctcaataaaggtatatttactttgaatggtgtatttaaattgaagatagtggtttgattttgtttttttcttcaaactattttaatttgcagattgtcttaatctggctattgcttgaggacctctctagttcagtccagacaagctttgatacttaagtgcttgtggtagttctcccacagtgaggaaggtgcgtgccagtggcaggcatgctagtgacgggaaagatccagttaagtcactcttccttccggggccctcctttcctttacttatctgtgaagagacatataggagacataataggattttttcagttttcagtttttgagattgttttttcagcttcactttaaacttgaagatctattgtcagattacagtaatagttctcaaagtgtaagtactagatggtaaacacagtaagaaatatactgtaggctggtggctcacacctgtgagcccagcactttgggaggctgaagcaggaggattacttgaggctaggagtttgagacaacaatctagcaagaccccatccctacaaaaaatataaaaaattagcctggcatggtggcacaagcctgtagtcctaggtggttgggaggctgaggtgggaggattgcttgagctgaggaattcaaagttacagtgagctatgattgtgccactgccctccaccctgggtgacagagtgaggccctttctcattaaaaaaaaaaaagatactagaggtaatatcttcgctaatcatacattattgagtatctactgttgtcagaatttgtgatacaacttttgccatttatacaagttctgcaaaatagccatttgtaactttgtatcactaaggttatgaatttaagttcagtccgccctccatacatgtgggttccacatccacagagtcagccaaccacaaatcaaaaatatttgaggaagaaaaaataatacaggttagtaaataatatagtataacagctatttacataacatttacattttattaggtgtcataagtaatctagaaatgatttacagtatgccagaggatgtgtgtgacttatatgcaaatactgcaccctttcctgtcagagatttgagcctcctccagttttggtattggagggtgctggcatcctggaaccaataccccttggatgcagagggacgaccatatgttcagcttcacatcagtaggaagcaagccgcagcaacgtctcgttctgagccttttctcctgttactcccactcctccccaaatctgatcaccattagttttaatattgtaatacttgtcttttcctttttctcagttactaggttttgatgcatttcttttttttttttttttttttggcgtaataacatttttggttttttagcagtcttttaaaaagttacagctttattgagatagaattcacagactgtacaattcatcctttaaaaatgagtaattcagtagtttttcatgtattcacaaggttgtgctgccatcaccactaattccaaatattgtttttatcaccactaaaggaacccaatacccattagcagccatcacccctattttcccctcctccctgggcactggcaaccactaatctactttctgtgtctatggatttgcctgttttggacattccatttaaaaaggagtcatacaatatgttgccttttatgactggcttctttcagccagcagaatgttttcaaagttcatccgtgatacagtatttgttaatactgtattccttagacaaataatattccataatattgttataccatagtttatttgtttactgatggacatttgagtggtttctgctttttagctttttgaacagttatctacaagtttttttgtagacatacattttcatttcttttggatttatacctaggagttggaattgttggattgtatgtaactgtgtgttttaacattctaagaaaatgccaaattgttttccagtgtggctgcactattttacattcccatcagcaacgtatgaaggttccaagttacttgtattgtaaaagaaaatttttagtcatcctagtgggcgtgacatgatatctcattgtggtttgatttgcagttccctggtgattaatgatgctgaccatcttttcatgaactcattggccatttgtgtatcttgtttgaagaaatctctaagtcttctgcccggttttgtgggttgtttttgttgtttttgagacagagtcttgctctgtcacccaggctggagagcagtggcacgatcagggcttactgcagccttgacgtcccaggctcaagcgatcctcccacctcagccttgcaagtagctgggagctacaggcgtgcaccgccacacccattaaaggtttttgaattttaatggagaggaggtctcactatgttgcccaggctggtctcaaactcctgagctcaagtgatccttccaactcagccttccaaagtgctagaattataggtgtgaggcaccacgcctggccctttgcccagttttaattgggttgtttttgttgttgagttgtaagaatgttttttatatgttctggatacttgacccttatcaagttcatgatttgcaaatatattttctcattctgtggattaatcttttcagtttgttaattgtgtcctttgcaacacaaaaattttaactaaaagttttatggtttcagcttttcttttggatccctatttcattttgattaaatttttgttaatctgtggatatccagttgtcctagcatcattcgttgatttgtagcagttttaaagtaaagataactaacagaatggttggttttgtgaggtttgtgttaattaatatactgttacaattctttacttcaattctctcagcccttcagcatgccggcaaacacatggaggattgcattgtggcctcctacacagcactacttcttgggtgtctctgccaggaaagtccagtaagtacatagttcagtgatgttttatgtatctttgaaagattccaatgtaacgacttcatacctttacatgtttcacttatttatttcttcagtgtttcccccttaatgtccaacttattccacaaaggctattggctgattatagggttgtttaaattgtttgtttcctatggaggaaaaatggcaagaaaatgtgttaacatttccagtagtttttttttttttttttgaggcggagtctcgttctgtcacccaggctggagtgcagtggcgcaatctcggctcactgcaagctccacctccctggttcccgccattctcctgcctcagtctcccgagtagctgggactacaggcgcctgccaccgcccccggctaacttttttttgtattttttggtagagacggggattcatcgtgttagccaggttggtctcaatctcctgacctcgtgatccgcctgccttggactcccaaagttctgggattacaggcgtgagccaccgtgcccggccatttccagtagttttatttaaattacctaaatagttttaaagtaaaaactttagtacagtctgtattggaaagggaatgtatagcattttttacatgctaatcctttccaatataggttttactaagtaaggcctggagtggagtaaattaaattgattttcactttttaaaaagtgaaataaagttgatctttatggctttattaggaaggatgtgcctgtcagagttaggctgttaaagatgtaagaaaaagcagttctggaaaacaagctagtcagtgctttaatctcatgaaaaaggaagaattacatacatgaaataaaattaaaaatcaaaatagtatataatattaaaaactttaaaatacttgttgagctttttcaggtacatcccaaaggtcagaatactaatgaaaaagctcttgtggccgggcatggtggctcatgcctgtaatctcagcactttgggaggctgagatgggcagatcacttgaggttaggagttcgagaccagccttgccaacatggcagaaccatgtctctactaaaaatataaaaatttgctgggcgtggcggtgcacacctctaatctcagctactcgggaggctgagacgcaagaatcgaatcgcttgaatcctggaggcggagtttgcagtgagccaagatcgtgccactgcacttcagcctgggcttcagagtgagactgtttcaaaaaaaaagaagaaaagaaaaagctgttgtttgatggatgaatctgttcacatgcctttggttggagtaaaagaagggatagtatgaaacctgtactcatctggcttaaacaagatggcagagtctaatttgggtgatgtcagtgcctcactgaggtcatcagagactcagatcatttctgtctttattatttttctgtatttttttgtagagacagggtttcaccatgttgtcctggccggtctcgaactcctgggctcaagtgatcctcctgcctcgacctctcaaagtgctggcattataggtgtgagccacagtgcccaccccatttctctctttaaactgctgtcctccacatgttgtcctctgctagcccttatggtcccgtgctgactacagctaggtgtctcatcaaattaagtagtgcctagcagtaatagggcctcttcctctatagtttttttttttttttcataggtgcattggctggaaatacatatctttttaagacaactgtttgtttatttcccctgtgggaccccatgccactctcacccctcaccaggtagacttctcatcttggccagcattgggtcacaatgcttttgtctgaaccagtcactggctgggaacatgggattactgtgagtggattagatcatcaggattcacttaggagaaatacaaatgtctagacaatcaggctgagtcagcctgaaagtgaaaggttgtgactatggggatagtctgctgccttgggaaaaacaaatatgaagggtaaaactgttgaagaagggtccagcagaatcattgtgagtgttctctttcagatggggggttgggcataggtggattatttttaagtgtaaagtccatttgtaaagccagattttgaaatggaaggcagattgttttctaggagcaagggcattgagggaacaagaaagagtggagacctataggaggggggcattagtttcagcaggaagcaggggccatctctttttgaagctggaggactggaagaacagagttaatgataaatgaatggctttatttgagcaggaactcatgctggctctgtgtacctgggcccatctacccaccccacgtttccttactttagccatctaattctttgtattgcctttttttttttttttcactttgtgtatctaagtcctgtgtgtttttctgaatccatcttgtccatctcttccatacttaacattttaactaacctaaatacaacagcccactctgtgtggcccctctgggtaccgccgatttcaggatcaagaccaaagttctcatcgtggctctggaggccccgcaagatctttatatccctttttcttatttccaatgacaagattttaagagcaaatcagaaacccatcacacacaggaaaggaggaagaggcaggcctcaaaagcagtgaaaaaaggccgggcgcagtggctcacgcctgtaatcccagcactttgggaggccaaggtgggcagatcacaaggtcaggagatcgagaccatcctggctaacac

SEQ ID NO: 447 - DNA, 294 bp, Homo sapiens
ctttgacaatgttcatactgttgagcaccattcttatcgaaagaagggaaggaagcaacatgggagttactggttctccttggccctatgcaggtagtaccgagtattccccatggcagaagtaggtctccaccttatttgtttttgcacaacagagatgatgcacagggcctgagcccgggatcagatccggtgcaattgcctattatgttcattcattcacaccttttttgaataccaactattaatacatgtcagatacccagttcagtactgggcatataaacattagat

SEQ ID NO: 448 - DNA, 545 bp, Homo sapiens
catctaatcccttctttccctttggaaagatgcatgttttttctcggagtcctagggaataccttagaatactttcatggttgtcattggtacacccatcccttgaggagccctgccacccgtaagtaggactgcaaggaaatacaaaattaagagaagtatgaaccctgatacccaggaacttaaaatcaggtgtataaattttgtacacctaaaaaatatggtacctaaagaggcgaacagcaaaacaagcaagaatgtgaatctttaaaatgtttctattcttcagcgcagcccaggaattctacctaaagtaacatatcctaaggcaacaaccaagaagtgtggaagaatgcatgtaagaagacacagtgatgtttagaatcctggggaaacggaacagccaaaaagtctcacagaggttaagtaaataatagcattttcatacgagtactatgtagtcatttaaaattatgtctttcagtacctagtaatggggaaaatgtattcattatatattattaaagaaaatacagggtacaaaa

SEQ ID NO: 449 - DNA, 1506 bp, Homo sapiens
aggcgcgggaaggaaggaaggaggcgaagcggtgcgggagggaggcggccgttgccatggaaggagctgcaaggtactctgggaccagaattctctctgcagagggtcgggtggggggcggccggctggggaaagtgaggggaaatccagtgccattcctttgtccttgcgcttctcagcctccctgcagaccgcgagccggagcccccgcacccccggggctggccccctggcctcccgccccagcccgggccggcggcccctccctgctccgctgtccgccttgggtacagaagcggcgagtggcccctttccaggaggcctgtttaccagcacgacaacggcaaattagtgcgcttaagaggcattcggcgtttaccccggccaacatgcgcagcgtgaagggggcctgcgaggcctgctccccggaatctgctgaaatggcccccctcgtgcatcttaatcgacttacttccacccatcacattaaacgcatttaatctactcttgcaaatggctaattttgaaaatccgcttatcagaattaggtcctcaacatccatatttatttactttccattttcataatctttttttttttttttccccttgtgtgggactgaattccatttactattgtctggctcgctctcgcccgtcccggggggcccggggcaggggacaagggccaggttaggagcaaactgggaaatggaaacctggcagggatgaaaggcatgggctcgggatttgaggactgggaggctcttcccgggtggcagcatcttcaggaaatcaccaagagctgaggcttgagcagagcaggtttaaaaaggcgatgaggaagtcttgctgaatcgcaggcgcccggggcctgcctggcaggaatcagcagccgtgtcagaaatgtgcaagaaagtggttgggatcaactgtcttccccagcgcccccggtgccaggctccgtgctaagcgcttcacgtggaccagcactcatgctcacgccagccctgctcagtgaatgccaggcgcgtctcgcagacaagaagactcctgctgtggcttagacccacatttacatccagactgcacgtcctcctctgcagcatgttgtcaggtgtgcaaggcacgtttttcctatgagtgtgtaagaaacacaagtttgtgtgtgcaggactcaggcctgtgagaaacgcagactcaagggagagatgggtgttcagaatctggaagatggctctccaggtcacaacctgtgcagcctcaagcgtggattccgcatgtggctttcgctcaccacgtttgggctctgcaagtttgctaagagtcgctacagagctaggaagagccgccaggcctagtggcctttaaaggacttagcactcaatgttaattttgttgttgccagtcccctaatgagctgatttggcacacatctagagcaaaaacctgaatttcacttcgtttaatttactttcaacattggctgggcacctcctattggcc

SEQ ID NO: 450 - DNA, 476 bp, Homo sapiens
caccggtataagggtgaggatggggatatgtgttcaattgcggggggaaaaaaacccttctagtttaaagacctggacactggagaagcctaggcttatcgaggaacagaggaggtggtgtcaaggaacaatttataatttagaggctgggaatggtaggggagagtgggaaataaagagtggttgattaatggggacaagtatatacttggaagaaataagacttggtgttcaatagatcagtaggatgactatagctaacatcaaccaattgtacatttcaaaatagctggaagaaaataatcaaatgttctaagcaaaaagaaaatatcagtatttaagatgatggatatcccaattaccctgacctgattatatgaatacatgaaattatcacatgtaccctgaaaatatgtacatttattaatgtagcaacaacaaaaaaatgaagctaaaaaaaaaaaaatctagaattt

SEQ ID NO: 451 - DNA, 476 bp, Homo sapiens
caccggtataagggtgaggatggggatatgtgttcaattgcggggggaaaaaaacccttctagtttaaagacctggacactggagaagcctaggcttatcgaggaacagaggaggtggtgtcaaggaacaatttataatttagaggctgggaatggtaggggagagtgggaaataaagagtggttgattaatggggacagtatatacttggaagaaataagacttggtgttcaatagatcagtaggatgactatagctaacatcaaccattgtacatttcaaaatagtctggaagaaaataatcaaatgattataagcaaaaagaaaatatcagtatttaagatgatggatatcccaattaccctgacctgattatatgaatacatgaaattatcacatgtaccctgaaaatatgtacatttattaatgtagcaacaacaaaaaaatgaagctaaaaaaaaaaaaatctagaattt

SEQ ID NO: 452 - DNA, 506 bp, Homo sapiens
caccggtataagggtgaggatggggatatgtgttcaattgcggggggaaaaaaacccttctagtttaaagacctggacactggagaagcctaggcttatcgaggaacagaggaggtggtgtcaaggaacaatttataatttagaggctgggaatggtaggggagagtgggaaataaagagtggttgattaatggggacaagtatatacttggaagaaataagacttggtgttcaatagatcagtaggatgactatagctaacatcaaccaattgtacatttcaaaatagctggaagaaaataatcaaatgttctaagcaaaaagaaaatatcagtatttaagatgatggatatcccaattaccctgacctgattatatgaatacatgaaattatcacatgtaccctgaaaatatgtacatttattaatgtagcaacaacaaaaaaatgaagctaaaaaaaaaaaatctagaattttatacctagcaaaactatccatcagaatatg

SEQ ID NO: 453 - DNA, 390 bp, Homo sapiens
cgctttctgaaattcgattcccaaatgcccaggatttcccctgtggttccagagaaagggagatatgtggcttctgtgaacacctattgagtgggatcacaaggaagcatcccgtgacctttcttctattttgagatgaggacgtaggtggctgtgctgctgaccagtgagtgagtcagtgggcccagggactgaacattgtgtataggtggagaacttgggaggcagaaccacatttaaagaaatgcttctggtcattctggtctaatttggcaatcaaataattttaaaactgaaggagtccacagagatttgtatacaagaatgtttatcgtaatgttttagtagtaacaacctaagtgtccacctgtaggggacggaggagatcaa

SEQ ID NO: 454 - DNA, 390 bp, Homo sapiens; identical to SEQ ID NO: 453

SEQ ID NO: 455 - DNA, 403 bp, Homo sapiens
aacatggagaaaccccatctctactaaaaatacaaaattagccaggcgtggtgacgcatgcctgtaatcccaactatttgggaggctgaggcaggagaattgcttgaacccgggaggcagaggttgcagtgagccgagatcgtgccactgcactcttgcactctagcctgggcaacaagagcgaaactcagtctcaaaaaaaaaagaatgatattctaaaattgtgatttgtttcctaggaccccttttgagcaacattgtgattggcttcaaccggaaacaatagttttaatctcgttttcatattttgcattcctttaaaacgcttctgctgcttttttaaaagtctagaagccactatactagaaagaccttgaaatgtgtataacactagttaaacagc

SEQ ID NO: 456 - DNA, 403 bp, Homo sapiens; identical to SEQ ID NO: 455

SEQ ID NO: 457 - DNA, 160 bp, Homo sapiens
cagcctggccaacatagtgaaacactgtctctaccaaaatgatataaaaattagctgggtgtggtgtgcgcgcctgtaaacccagtgactcaggaggctgaggcatgagaatcgcatgaacccatgtggggcagaggttgcagtgagccaagattgtgtc

SEQ ID NO: 458 - DNA, 403 bp, Homo sapiens; identical to SEQ ID NO: 455

SEQ ID NO: 459 - DNA, 741 bp, Homo sapiens
tgagagtcactcatcacgagaacagcatgggggaaactgcccccatgatccgattacttccacctggtcttgccctttacatgtggggattattacaattcaaggtgagatctgggtggggacacagagccaaaccatataaggcacactgctcaccaacattaggtagagttcatacatttctttctctcagcaatggacaatggatacattagaatgaggatgattgctgcaatgctaaccagctaataaatagaagtggactgggatgagagtccaggcaattgcctaatgagccccgctatacatatttgcaaaaatgtagaatgatgccattcttttttgttttggcaaatagttatttttcattaaaaatgtaatgttatgttaatattggataaaaattgatttaataaaaatgttataacatgtagtggctattattgtcattttgtttttttagagaaagggtctcactctgtcacccaggctggtatgcagtggctccattgtatttcactgtagcctcaaactcccgaaattcaagcaatcttcccaagtagctgggactacaggtatgtgccaccacacctggttaactttttattttttatggagatgcagtttcattaggttgctcaggctggtctccactcttggcttcaagtgatcctcccacctttgcctcccaaagtgttaggattataggtgtgaaccattgtgcctggcttatttttttat

SEQ ID NO: 460 - DNA, 741 bp, Homo sapiens; identical to SEQ ID NO: 459

SEQ ID NO: 461 - DNA, 741 bp, Homo sapiens; identical to SEQ ID NO: 459

SEQ ID NO: 462 - DNA, 128 bp, Homo sapiens
cctcagcctcccgagttgctgggactacaggcgcctgccaccacgcccggctaattttttgtatttttagtagagacggggtttcaccgtgttagccaggatggtctcgatctcctgacctcatgatc

SEQ ID NO: 463 - DNA, 222 bp, Homo sapiens
aggttagttccttctgtaagctccacctcctccaggggcacccgctaattggctccctcagatcctggctagccagtacaaggcctcagcagtgcacagatcccatctccagccagtccaggtggcgctcgcatggtagggtgcatgaacctgtgttggagtacaggccttctttgctccagttgtttcccaataataaatgttataaaattatcaaaggca

SEQ ID NO: 464 - DNA, 128 bp, Homo sapiens; identical to SEQ ID NO: 462

SEQ ID NO: 465 - DNA, 222 bp, Homo sapiens; identical to SEQ ID NO: 463

SEQ ID NO: 466 - DNA, 222 bp, Homo sapiens; identical to SEQ ID NO: 463

SEQ ID NO: 467 - DNA, 128 bp, Homo sapiens; identical to SEQ ID NO: 462

SEQ ID NO: 468 - DNA, 1884 bp, Homo sapiens
ggtggaatcatcgccacttccagcaccacgccaagcctaacatcttccacaaggatcccgatgtgaacatgctgcacgtgtttgttctgggcgaatggcagcccatcgaggtacgactaagaggatggtgttgacctaggaagtgtttgtcctgggcgaatggcagaccatcgaggtacaactaaggagatggtgttgacctaggaagtgtttggcctgggcgaatggcagccatcgaggtacgactaaggggttggtgttgacctaggaagtgtttggcctgagcagggagcagggaaggaagcctagagagctgacattcagccaggcaggtccacatctcctgctacacagatacctctcctaggtaccctgaattgttctggctggaatgtatgtggaatggcctcacctgtaaatacagacacagctcctcattagaatggtagatgtctccctcctacccttaggccaggaagggcattttctggcttgttttttcccagggtagagggaaatcttgttccagttcagcaggaaggcaagatttcaggggctcaagcttggtcgccaaccgactagctcatgttgagaaaaccttatttggagaatcatcatcctgtacactgggaggagcctcaacgtggcttggtccaatctgcttcaccagtggataagaaattgaaggtcagcgagaggatggaacacgttcagggtcacataatttatttagttttttttctgagacggagtcttgctctgttgcccagagctggagtgcagtggcacaatcttggctcactgcaacctccgcctcctgggttcaagcaattctcctgcctccgcctcccacgtagctgggattacaggcatgtgccaccatgccaactaatttttgtatttttagtagagacagggtttcaccatggccaggctggtctcaaactcctgacctcatgatctgcctgcctcggcttcccaaagtgctggtattacaggcatgagccaacgtgcccagccgagagagtcacgtaatttagtggccagtctagggtgaggccccagacctttggactgctaggccatgccttccatttactataccattttattttcatattagttcattttattactacaaatatagaacacacttggtataaacttctaaacagtacagaaatatccagaattaaaacacgagtctcagcctgggcaatatagcaagaccctgtctctaaaaaaatacatatttttttagttagccaggcatggtagcacgtgcctagtctcagttattggggaggctgaggtgggtggatcccttgagctgagcccaggaggttgaggctacagtgagctatgatcacaccactgcactccagcctgggtaacagagcaaagctatgtctcaaaaaagaaaaaaaaagtgagtctctcaaacctcccctttgccccaaattttatgcccttgagggtaaccactgttaacaagatgctatacagtcttctagatatttttatatgtgtataaacatgcatatatctgtttctttacaaacaaaaattttaggccagctgtggtggctcacacctgtaatcccagcgctttgggaggctgaagtgggagaagtgcttgagcccaggagttcaagaccagcctgggctacatagtgagaccccatctctgcgaaaaatacaaaagattagccaggtgtagtggtgtgcgtctgtggtcccaggtgcaggggaggctgaggtgggggaatcacttgagcctgggagcctcaaggctgcaatgagctatgattgcaccactgcactccagcggggacagaagagggagactctgtctcaaaaataaaaaaataaaaaacaaaaaaa

SEQ ID NO: 469 - DNA, 1885 bp, Homo sapiens
ggtggaatcatcgccacttccagcaccacgccaagcctaacatcttccacaaggatcccgatgtgaacatgctgcacgtgtttgttctgggcgaatggcagcccatcgaggtacgactaagaggatggtgttgacctaggaagtgtttgtcctgggcgaatggcagaccatcgaggtacaactaaggagatggtgttgacctaggaagtgtttggcctgggcgaatggcagccatcgaggtacgactaaggggttggtgttgacctaggaagtgtttggcctgagcagggagcagggaaggaagcctagagagctgacattcagccaggcaggtccacatctcctgctacacagatacctctcctaggtaccctgaattgttctggctggaatgtatgtggaatggcctcacctgtaaatacagacacagctcctcattagaatggtagatgtctccctcctacccttaggccaggaagggcattttctggcttgttttttcccagggtagagggaaatcttgttccagttcagcaggaaggcaagatttcaggggctcaagcttggtcgccaaccgactagctcatgttgagaaaaccttatttggagaatcatcatcctgtacactgggaggagcctcaacgtggcttggtccaatctgcttcaccagtggataagaaattgaaggtcagcgagaggatggaacacgttcagggtcacataatttatttagttttttttctgagacggagtcttgctctgttgcccagagctggagtgcagtggcacaatcttggctcactgcaacctccgcctcctgggttcaagcaattctcctgcctccgcctcccacgtagctgggattacaggcatgtgccaccatgccaactaatttttgtatttttagtagagacagggtttcaccatggccaggctggtctcaaactcctgacctcatgatctgcctgcctcggcttcccaaagtgctggtattacaggcatgagccaacgtgcccagccgagagagtcacgtaatttagtggccagtctagggtgaggccccagacctttggactgctaggccattgccttccatttactataccattttattttcatattagttcattttattactacaaatatagaacacacttggtataaacttctaaacagtacagaaatatccagaattaaaacacgagtctcagcctgggcaatatagcaagaccctgtctctaaaaaaatacatatttttttagttagccaggcatggtagcacgtgcctagtctcagttattggggaggctgaggtgggtggatcccttgagctgagcccaggaggttgaggctacagtgagctatgatcacaccactgcactccagcctgggtaacagagcaaagctatgtctcaaaaaagaaaaaaaaagtgagtctctcaaacctcccctttgccccaaattttatgcccttgagggtaaccactgttaacaagatgctatacagtcttctagatatttttatatgtgtataaacatgcatatatctgtttctttacaaacaaaaattttaggccagctgtggtggctcacacctgtaatcccagcgctttgggaggctgaagtgggagaagtgcttgagcccaggagttcaagaccagcctgggctacatagtgagaccccatctctgcgaaaaatacaaaagattagccaggtgtagtggtgtgcgtctgtggtcccaggtgcaggggaggctgaggtgggggaatcacttgagcctgggagcctcaaggctgcaatgagctatgattgcaccactgcactccagcggggacagaagagggagactctgtctcaaaaataaaaaaataaaaaacaaaaaaa

SEQ ID NO: 470 - DNA, 29543 bp, Homo sapiens
cttgaaacccctgctgattggtgaactggccccggaggagcccagccaggaccacggcaagaacgtaagtctggcttgcaacctgggtgggggtggagacgaggctgggggtggctgggagtctgagagaggctccccttgccccatgaccagtaactggggctgaggcaggggtgcttttgtcctggaggagccactgtggttcacctgtgttcagggagggcctcagagcctccctgggagccggggtttgacaacaactagtggcgtctcctctctcctggccagtttcattttccttctcctccatccctttccaggaaggtgccagatgacaatctaggggaaagacaggacagaaacaccgaaaaatgtcatttgatgacaagagtggctttggggtgtgtggtccggggcacctctttgagaaagaatgaccattccctggtcatctgttcattgtctgcaggtcagacgcccccctgggtgctgggcttccaggacagccatgtgtgaaaatagcaacccctgaggtctcatgggctgttgttttgttcaacaatgaagtctccatgtaaatggcggagccgtttatagaagaaagttgggacaggaggcaggggcagggcaggacggggaggagagttgttacaaggagaggagtggtacccacaggctgtgaccagggtggtcatggaagtcccaccctggcctcagcaagctcttcctcctcttgttgccagcctgggccagacccctctgtttagcagagccagggcaggaccagggtctctcccggcctggactcttggccagtcccccaccacccccattgcctctggctttcctgatgagctgcgggccaccctgcaggtccttcaaaggccaatgcccctcctctcaccttgccctccatggcacatgagatcacctgccctgtacccatgccagcccatgcttgtcccctcctgcctccttcgcaagtgggtccatctcccactctcacctccagcacctcctggcctgcggcttccccagctctgctcgtcctgccctgtagctcccttgtccatggccttgctccttggctctctccactgctctccctttctgctgcagatcctgcaccatttagcatccaagctcccaccaggcaccaccagaaccacccttcatagcaccttggtcatgccctgtgggtaccgctcctctccttgtatccactctcctccccgtccggccctgcccctgcctcttgtcccaagttccttcttcctcgcaatgccattgtgttcccagggccctccttgactccgctttgcctccctggctccatgtgcccgggactcacagccccctcctgcctgcctcagctcgccctcctgcgctagtttgtgtcgcccccaactcaacccctcaagacccaacagtgtgcgcagagcaagtggtgctctgtttggtggtggaaaatgcaagttttatttttcttttcttttctttctttctttttttttttgagatggagttttgctcttgttacccaggctggagtgcagtgacaccatctcggctcactgcaacctccgcctccaggttcaagcagttctcctgcctcagcctcccatgtagctgggattacaggtgcccatcatcatgcctggctaatttttgtatttttagtagagatggagtttcactatgttggccaggctggtctcgaactcctgacctcaggtgatctgcctgcctcggccacccaaagtgctgggattaaagttttcttttttaaaaaagtgtggtcaaccattttggtcatttgacgtgtacagttcagtggcatcaaataagcacatttacattgttatgtaaccatcaccaccatccagttctcatcttccccaaattgaaattccacatccattaagcactcactcctcattctcccacctctcagcccctggcaggcaccattctactttctgtctctgaatttggcctctccaaggacctcctgtatatggaatcatacaatatttgtcctttggtgactggcctgtttcccttagcatgatgtcttcaaagttcactcacattgtagcatgtgtcagaatttcctcccttttcaaggctgagtaatattccattgcatggatagaccacgtgttgctgatccattcatccatcacgagatctttgtgttgtttctacctttttcctgatgtgaatagagctatgaacacagggtgtataaaatgcaagcttttgagtcaaagcctttctctgtcactcttacctagctgtgacaaatatacaggccccagggctgtgtggggcatgtggtaacagcagctattgtagggactcctggagggtcgaggcttgtggcttggccccctcttgccacagcttctctgggttgtgcattggctgttgaaatggcagctcgagacatatgttccctccagagtggctggtggctgactcctttccctgtgctcttggtcaacagtcaaagatcactgaggacttccgggccctgaggaagacggctgaggacatgaacctgttcaagaccaaccacgtgttcttcctcctcctcctggcccacatcatcgccctggagagcattgcatggttcactgtcttttactttggcaatggctggattcctaccctcatcacggcctttgtccttgctacctctcaggtgaggcgtgacaccctcacttcccctagctgacagaggcctggtgcctgtttgctgaggctgtgacagcacgtgtgaccctctctccccaggcccaagctggatggctgcaacatgattatggccacctgtctgtctacagaaaacccaagtggaaccaccttgtccacaaattcgtcattggccacttaaaggtaagtgtcagcagccctgggcatctgtcctgttggacagcagttgagacagagggaccaggattcctctctgctcagtgctctgaggctacagggtgacaaggcaggtgtgcctatgctgagggccatggtgactctccattctgctgacttcctgagccctgtctctggatcaggtccgaaccacaaagccatggtgtactactcattatgaagacaggcacacacctttcttgtcttttggctcagcggattgtattttttgatgttccttagctaaggactcatctaacaaatctgtttttgtttggggacagtaaagtagcagtatttttttttttttttgagacagagtcctgctcttgtcacccaagctggaagcaatggtgtgatcttgggtcactgcaacctccacctccgggttcaagcaattctcctgcctcagcctcccgagtagctgggattacaggcactcgccaccatgcctgactaatttttgtatttttagtagagatggggttttgctatgttggtcaggccggtatcaaacttctgaccttgtgatctacctgccttggcctcccaaagtgctgggattacaggtgtgagccaccgcatccggcctgtagcatcttttttgatgagttggtatgcttcctttcactggggatgtgagctctttaatacgttgtgctgggtgtggtggcatgcacctgtaatcccagccacctgggaggctgaggcaggagaattgcttgagcccaggagttcgagaccagcctgggcaacatagtgagacccccccccatctctcaaaaaaaaaaaagaaaaagaaacacattgtgctcctctcttcccctcagaagccaagaggtacaaagcagcatttgaaacagcaactatctttagtctgtgtttttggtgcccccattctctccttcctcatctggcatttatgcttttatctttattttagccttccgttatatatgagtcttttatctcaagccacttcaaatactctttggaaataagcggggtacaaaaagtaaaagtcatcctataaggcctcagataggggacaccaaactacggaatgatcagctggcccaaaggacaaaagtcattagaagtgcaggagttaaggaagttccactctcacctccccctagataaggaagcagaccacagagtctcagcatgtttgtagaaagacaagctggaattgccaactgccttgttctgatctgacaggcgttatctcctcagttttgaaaatgagtctttgccaacttgctctctgaaatagactatccccatcccagcctgacccaacagtacctgcttcctgagaaaagctgggtcctaaagaatccatccctccacaccctggcaagggacgagctacatgtggggtgtagcttatcccctcttccacccagaccgcaacggggcccttggcttgccggctgcagatctcactggtggccaaccacccctgagctggtcaccagtttcgcagcgagcagcttgcctggccctgagcctgaagcggcctgagaacctggtctctgtccagaatctcaggggcaaagggagagggtgcacatagtggagtgctttgtttcattttatactcttctctgttggatcaaaccctcctcagtatggcaaagtaacatttaactcctgacccatgttagcccccacacacttaacaaagatgggctgtgtcctgcttccagattctgggcaggggccgggcaggggggattgttcctgtccaattgccctcagtctttgaggggccccagagcacggctgttgcgtcaggcgggagacggggccaggacagaggactggtctccatgtagaacgtggatgacagcaaacagggtccttgggcttggggatgtgggctccactcatggcccaccagcccccactggctgtgtccttggtgctgtgtcacagagacaggccaaggacatggacatgtggctcactcaggggtgccccagagcacggaggtcaagcttgcctgaaattggctctagcactcggcaggtgcacagccatggggacaaatcttgtaggtctgtgtctcttcccatcactgggaaaaaggggactggctacagggaggtcctcaagggcctcgccaactcagatgtcttagcacaggctggaaagacctgtgagtaggttaccaggtgctgtgagaggctgggacccccttcttcctgttggctgcactgctaatgggatttaatgggagttcttcacatcctgacctgtttgccttcagcccgtgtcatgcccagtggacatttcttccaaagtgtgatcttttacaaagacgattctgaggttaaaactctttcgtagttcagcactgtacttaggatgaaatgcaaacttcagccaggcacagtggctcacgcctataacctcagcgctttgggaggtcaaggcaggaggattgcttgaagccaagagtttgagaccagcctgggccacatagcaagaccctgtctctactaaaaataaaagaattagccggggatggtggtgcatgcttgtagtcccagctactggggaggctgaggccggaggatggcttgagcctgggatttgaaggctgcggtgagctgtgatggtgccactacattccagcatgggtgacagagtgagacactgtctctaaataaataaatgcaagctgaaaggcccagtgccatctgggcgctgcatctggaaatggacatcaccagactttctgcagcctcatctcaggccaccagggctgggattagggtgaaacaagtaaggcactcgcttagggtataaaatctaaggggacaccagacaaattctaaggggacaccagacaaattcagttatcaagataaatgatgttttaatgcaatgtggttttgttttgttttttgagatggagtttcactcttgtcgcccaggctggagtgcaatggcgtgatctcaactcactgaaacctccgtctcccgggttcaagcgattctcctgcctcagcctcccgagtagctgggattacaggtgtgcgccactatgcccagctaatttttttgtatttttagtagagatggggtttctccatgttgtccaggctggtcttgaactcctgacctaaggtgatccacctgccttggcctcccaaagtgctgagattacaggcatgagccaccacgcccggcctgcaatatgtttttaaaaaaatcaaaattaatgcaaaaaaatccacaatgaacaaaatatcaaaattttaaataaagatcaggatgaactgagggaaatggaaaaacatgcaaccctctaaacatgttcgtgtgtcattttttaatggttgattttttttccagaggattaaagtagttaaaaaaatatttaacaatgaagaagttgatgtattaaaagtcataacattctaagtgtaaatgctttatttataccaaaacagaacttattatacttttgcttcagttgaatgtaattagaaattagttaagaccgggcgaggtggcttggccgggtgtggtggctcatgcctgtaatcccagcactttgggagggtgacgcaggtagatcacttaaggtcaggagttcaagaccagcctggccaacatggtgaaaccctgtctctactaaaaaaacaaaaattagccaggcgagggtgctcgggaggctaagacaggagaatcacttgaaccagggaggtggaggttgcagtgagccgagatcgtgccacagccctccagcctgggtgacagagtgaggctccatctcaaaaataaaaaataaacataaaaattatttaagctaatcgcttggttgacagaaaccatcaaactcagcaattctttccattgaaaatgaaatgaggccaggcgcggtggctcacgcctgtaatcccagcactttgggaggttgaggagggcagatcacaaggtcagaagatcgagaccatcctggctaacacggtgaaaccccatctccactaaaaatacaaaaaattagccgggcgtggtggcacacgcctgcagtcccagctgctcgggaggctgagacaggagaatcacttgaacccgggaggtagaggttgcagtgagccgagactgcatcactgccctccagcctgggcgacagaggaagactccgtctcaaaaaaaaaaaagaaaaaagaaaaaagaaagaaaatgaaatgaggcaaaaagtaggctttgaaaatgttatcgatgagtttgtttccattaaagccagaagtgcacttttttttttttttttttttttttttttttgcctcaggctctgatatggcgccacccagcactgctggtcacagttataccgaggagctttcctctggcttctggagcactctacactcccccttcctctcccagggcctcccgtaggctcttgcctctgtcaggaaagcacccctcactctgcctggccaacttctccagctgcgtggacacttagctttcctggccccagctcagtttgggtttggtgtgatgaggccagaccctccctcgcagctccgtgaggacaagggctttgtctcttggttcacctcccaggcagagcacggcagctggcttagggtaggcaacatctgcaccacattctgggaacacggagctggccattgttcctgggcaaggcgggcttcccggtgcccggaaggaggggctcttgaaggacaagcagggcttcacctggcaaagaagaatggaagagaggcccggtgcggtgggttatgcctgtaatcccagcactttgggaggcggaggtgggcggatcacctgggttcaggagtttgagaccagcctggccaacatggtgaaaccccatctctactgaaaatataaaaattagccgggcatggtggcgggcgcctataatctcagctactcggaaggctgaggtaggagaacctgggaggcggaggttgcagtgagctgagattgcaccactgcactccagcctgggcgacaagagcaaaactctgtctcaaaaaaaaaaaaaaaaaaaatggaagagaatcacagcagaggaagtagcatgaacaaaaaatgctttcattacatctcatcccgagtccagggagaaccgggactgcccacctcactgcctccttgttgtcagcccgtcttgctttcctccatctgtttgttcaataaacatctctgggttggtatcctccaaacatcacgcttacttgtttcatgccttgctcctcagtttctttgtgccagagatttttccatttgattcttcccaggaattttgttccttttgacaacaaacgcaaatgtgtcatttgattcctcgagcctctaagctttctttctttcttttcttttttttttttttttttgagacagactcttgctctgttgctcaggctaaagtgaagttggtatgatcttggcctcctgggttcacaggattctcctgcctcagactcctgagtagttgggattacaggtgcccgccaccacgcccagataatttttgtagttttagtagagacggggtttctccgtgttggccaggctggccttgaacgcctgacctcaagtgatccacacgcttcagcctcccaaagtgaagcctctgagctttcactctctgactttttttttttttttctctctctctctctctctcatgggttttgaggcctgccagtttccagggccctgaggttactgcaaaggccacagctgtccgttgctgttcccacccatggctattagtgtccatagactgtgtgtgccaaaagcatctcccaagtaaaatgtttgtttagcaaataggcattttttgcaaacccttagccaaagcattgatccggcaacagttcaccaggatagtcgtgatgccaaagggtcaggaaagtgtgttttctttcatctgtcgctgggcaactgtcgagggccataactctgagctgaggagacggacacctgtggcctcaaaagaaatatccatgttatgtgtcttgtctcatgggatcctatttgagtgttagaaacaggaaagttcttcttgttcatgttagcagttgtttgttgagccctccctccagccttcctggtgtgacacgaatctcaggacccaccctcagcatagcagcacaactgcgctctccaaatcgtttattgagatacagttctcacttttttttttttttaaacagagtcttgctctgtctcccaggctggagtgcagtggtgtgatctctgcctcccgggttcaagtgattttcctgcctcagcctcccgagtagctgggattacaggcgcccacaaccacgcccggctaatttttgtatttttagtagaggcggggtttcaccatgttgcccaggctggtctcaaactcctgacctcaagtgatccacccgcttctgtctcccaaagtgctggaattacaggtgtgagccaccacgcccagccagttttcccatttaaagtagacaaatcaatgacttttggtatattcacagatttatgcaaccatcatcatagtcgattttagagcatcttcatgatgctcaaaagaaaccccacgtttcttagccatcacatcccaaccccctcactccctcccctaccccaatcctagccctacacaactgctcagctttctgtctctatagatttccctattctgggcgtttcatgtcggtggaatcatgtgatatgtggtcttttgtggctccttccttcccttagcatgttctccaggctcatccgtgttgtagcaagggtcagtgattcgttctgttttacggcacagccaaatgatattccactgtgtggataatctgcatttcattcacccactcatctgttgatgaacatttgtgttgcttttgctcttctggttcttttgaagaatgctgctgtgaacactgctctatgagttggtgtgtggacatgttttcatttctcttggatatacgctcaggagggagatttctgggccacatagtagggaccacttctcactgtccctgaaacctcggctttaccttgcacagctctggttccacacctggtgacggagaggcagagactggctgccacacctgctggagcgctcaccgtgtggtccctcagcagcacgcctcatctgccaccatcgtcttatgatcagggaaactgaagcctagagagataaagtgacttcactccatctggggctggcgcatgctctgagctcagtcatggcagggctggattctggccttgtgggggcctgaagtgctatccccgagggttgaaggttccgggaactgctcctaagaagggcctgttacaagcgagctcggttccctggtggcttgcatggctcatccccacccctctctccccacagggtgcctctgccaactggtggaatcatcgccacttccagcaccacgccaagcctaacatcttccacaaggatcccgatgtgaacatgctgcacgtgtttgttctgggcgaatggcagcccatcgaggtacgactaagaggatggtgttgacctaggaagtgtttgtcctgggcgaatggcagaccatcgaggtacaactaaggagatggtgttgacctaggaagtgtttggcctgggcgaatggcagccatcgaggtacgactaaggggttggtgttgacctaggaagtgtttggcctgagcagggagcagggaaggaagcctagagagctgacattcagccaggcaggtccacatctcctgctacacagatacctctcctaggtaccctgaattgttctggctggaatgtatgtggaatggcctcacctgtaaatacagacacagctcctcattagaatggtagatgtctccctcctacccttaggccaggaagggcattttctggcttgttttttcccagggtagagggaaatcttgttccagttcagcaggaaggcaagatttcaggggctcaagcttggtcgccaaccgactagctcatgttgagaaaaccttatttggagaatcatcatcctgtacactgggaggagcctcaacgtggcttggtccaatctgcttcaccagtggataagaaattgaaggtcagcgagaggatggaacacgttcagggtcacataatttatttagttttttttctgagacggagtcttgctctgttgcccagagctggagtgcagtggcacaatcttggctcactgcaacctccgcctcctgggttcaagcaattctcctgcctccgcctcccacgtagctgggattacaggcatgtgccaccatgccaactaatttttgtatttttagtagagacagggtttcaccatggccaggctggtctcaaactcctgacctcatgatctgcctgcctcggcttcccaaagtgctggtattacaggcatgagccaacgtgcccagccgagagagtcacgtaatttagtggccagtctagggtgaggccccagacctttggactgctaggccattgccttccatttactataccattttattttcatattagttcattttattactacaaatatagaacacacttggtataaacttctaaacagtacagaaatatccagaattaaaacacgagtctcagcctgggcaatatagcaagaccctgtctctaaaaaaatacatatttttttagttagccaggcatggtagcacgtgcctagtctcagttattggggaggctgaggtgggtggatcccttgagctgagcccaggaggttgaggctacagtgagctatgatcacaccactgcactccagcctgggtaacagagcaaagctatgtctcaaaaaagaaaaaaaaagtgagtctctcaaacctcccctttgccccaaattttatgcccttgagggtaaccactgttaacaagatgctatacagtcttctagatatttttatatgtgtataaacatgcatatatctgtttctttacaaacaaaaattttaggccagctgtggtggctcacacctgtaatcccagcgctttgggaggctgaagtgggagaagtgcttgagcccaggagttcaagaccagcctgggctacatagtgagaccccatctctgcgaaaaatacaaaagattagccaggtgtagtggtgtgcgtctgtggtcccaggtgcaggggaggctgaggtgggggaatcacttgagcctgggagcctcaaggctgcaatgagctatgattgcaccactgcactccagcggggacagaagagggagactctgtctcaaaaataaaaaaataaaaaacaaaaaaattctaccttgtatcctgcaacttgccacctctgcgaatgtggatgcccttcccccccagttcatgtagacaggtctcgtctccctctagccatatggtattctgttgtacttctgaaccataacaggacctacattattttatatggtagacaaattgagtgtcagtagttcataatttctttcttttcttttcttttcttttttttttgagacagagtcttactctcttgcccagtctagagtgcagtggcacgatcttggctcactgcaacctccacctcccaggttcaagtgattctcctgcctcagcctcccgagtagatgggattacaggtgcacaccaccacgcctggctaattttctcatttttagtagagacggggtttcaccatgttggccaggctggtcttgaactcctgacttcgtgatccgcccacctcgccctcccaaagtgctgggattacgggtgtaagccaccgcgcctggcccataatttcttttgaataaaagccccaccaatgcgttccacaaaaaaatgttcttatttaatacattctttttttttatgtagagcctctatgtcgggacctaatttagaagaaaaaaataaatatatgcgctgctttttggaaatacattaatgattaaaatgaaagtttagaagatccttgttgcttttatgcagatcttaggagccacaaagccatgcatagagtagggttcaatcagcatctgccaagtgaggccaattttccctcactaaggagtggcaccgtgagtgaagtagtattcccgacagccttggcgcctaaggcttggaacaaggcgaggagacagcctggctccccagttctggtttgtacaccctcttcttatttcatttccacccgtgagactatctgagcaggaacgtggatttttctgtaacatggccaattcgcaggaaatcagccacagttctgtactttggaagcctctctaagctgccagggattccattttctgccaaagtacaggctattgttattcttctaggaaacagtttgccagctttaattagaggtgtctagaaaacagaactgatgaacttgaggccctctgataagtggggacaaaggcttcattttctcggcgaggctttgtaatgtagagccgttggctgtcctgacagatgttctctgtgtctccaacaaagaaagtctagtcccaccagctgcactggcaagaaggcgtctttcttgtgcgtggtggccagagaagcctctcctttcccgacatcttctcacccccgacacttctggaacgctggctttggggcaggagataggggtgggaggctgtgaggatctggttgttcagttaccagcggcgtttggaagtccccagccagtgccgcggtgttctgtggaaatccccgctctcacactcatggggaaaggattggtgcttcctgggttcctggtgttttgacctgtgctctggctctcgcaggacccggccgccctggaaggaaccctggtctcttgactgaagtgacagtgggtctgatgggacttgtcacatgccagtcccacacaccacagcagggccaggtggggcggccaggtcccagggcctcaagccaccatcccagtctccagagcaaggatgccggccagggcttctatctctggggacagataagcaaagcagccctgccaagcggctcccagcacgtggaactgtgaatagcgcgggctccgcagtaaagcccttttcctcgttttctgcattttggtcttattgatgctgtccaggaggattctttttgtcatatgtagcaaagtatattcactttacccagagattcatttcttgtgtgcttagaaagttcttcatacatattattttcagttctttaaggttttgtgtttcaatctttaacttctgccaaatgggatatgggtaggatgatgttcggccttcacttttctccagagtcggccagttttcccggcacccccatgaggtggcattgcttcttcatatgaggcagtgagtgctcctgagcccgggcttggcctgggctgggctgtctgtcctctcccaggccaccgtctggatgacttgggggccacactcacactcattcatccttggcacttaactcattggaagctcgtagtggggtgcctttccccttctctttctctctctttttgtttttgtttttgtttttgagacaaggtcatgctctgtcaccttggctagagcgtagtggcgcaatctcggttcactgcagcctcaacctcctgggatcaagccatcgttctgcctcagcctcccgagtagctgggactacaggcacccgccaccatgcccggctaattcttgtatttttagtagagatggggtttcaccatgttggccaggctggtctcgaactcctgacctcaagtgatccgcctacctcagcttcccaaagtgctgggattacaggcatgagccactgtgcccggccaaggtctgtacttctttatatgtctcatggatgtttcttttaaaacgcaatccttatatgttttatattttgtcattatgattggaggttctccagtactcgggaaagcagtggatattggggtagttatcttaattttcttttttttctaaatttttgtttgcatggccttccaatgaatgggatagttatcttttgtcccgctagtgtccacttacgtctcttcgtaattctagttgtgtttcggttgattcttttgagtttcctgggtagatgatcatatcctagaaaataatgaaaacgtagtctctcggcccagcgtggtggctcacatctgtaatcccagcactttgggaggccgaggctggcggatcacgaggtcaggagatcgagaccatcttggctaacacaatgaaaccaccgtctctactaaaaatacaaaaaattagctgggcatggtggcacacgcctgtagtctcggctactctggaggctgaggcaagagaatcgcttgaacctgggaggcggaggttgcagtgagctgagatagcaccactgcactccagcctgggcgacagagtgagactccgtctcaaaacaacaacaacaacaacaacaacaaaacaaaacaaaacaaacagaaaaaaagtgtagtcactctttctttcttctctttctttctttctctctctctttctttctctccctccctcccttccctccctccctcccttccttccttccttccttccttccttccttccttccttccttcctttccttctttctttctaatctggatgttgaagtagtctctttctttctaatagctccactctgttttctgctttgggttttattgcattgacgggaaatttcagagctgagtttaatagcggtgatattggcagcagccttgttttgttcttcttttgccatatccccgttttctgagggggctggtgagaccattatcccggtagcagtgtaaaggggcctcagaagccgtgcggtgcctgagatcctcctcctcctcccatccgggaaaccacctctgctgctctgactgtctgaagctaacctcctgggcttcctgcttgaggcagaccttcatgaacaggcttaagccacccatcccgccttgggacacacatgccgccctctcggggaccttggactgggaccttgccattctgctcctgctggggaggtcgtgccgcctgtttctctctgtgtgtgagtttgcaggttcccagaggcagagactgggctttgcgacagctcccctcccccaaccctcgatggacaaggagggcccttgtcattcctcagacattttgttccaaagctgaaaggtcccctccacatggcccggcatcccccaggccctcatccaagcctggccttgaggtgcatggagaggccgaggacaggagagtcagccccgccgccagggctggctgcactccctcccttgcccctggcctgcgtctctgcctgtcaaccgcagcctgggaaggcactgttgctgatcagggggaggtccatgtgtgccacccacacccttggccgcagcccagccaggtgaaagtcatgtgtcttccttgcctcttgggctttctctgtgtgtgtgacggggactcctctggaggaggagatgtgtggggtcctccactccccacacttggggctctgagcccccagttgggaagaagcctgactcttgttgagtgagtctgtggaccgggcactgtgatgggcagtgtgcgtgcacaacgtcacttaatccttgcttaacccgtgaggcgggagctgtcatcgacccatttcatggatggaacagctaaggccaagagacatgaagtgacttgttcaaggtaacagcaaggaaaaggcaacaccactgtccgaacccaaaccatctggctgcaaaccacagcttcggagtcctgggggcccttgtgaaatatgtttgttgggtagccccagctttctgatcaattaaacagccaggcactcacccccctagcttgctacattctaaaatacctctccctcccttccctggtcccatgacttaaacggcaaagctctggcaaagaactgagcgtgggaaagatgagagcagagagttagccacagggcagggcttcgtatcccaaacccacagttgtactttctggtttgggaggggagtattggccatcccccagcagagccgctgcagctgaggccatcgagatgggcacagatgtgtagtggtatgtcaccatacgcatgtacatacacgtgcgtgactgtgatgagcattttgctcaccgtcccacagaggcccactctgaggcctgctgctgcctggcaagcaggaccccctggctcccgagggtcattctggggcattgaagggacgcacactaaagccagcagtgcttaccagcagaggcagcccctgtaacctgtgttgtccacccacaggccaccatcacccatgagaacagggtgcctactgtgcacatgcagctccaaacagactccccaggtgcctcccaggcccccacaacagcgtggccagccctcagtccctccataggatgccctggcccctgctgacctgcctgggttgccctctgtgctcacttccgagtacagccggcccagcccgagagggatgggatgctctgtgggacagagatgcggtggggaggagctcttgagcagagctggagacactgcatgccaaggctggggctatgagcctgctccctggcctctgggagaagcttagagcaggactcaggggcctgttctgtgggccactgcaggccccgagactggccacctcgagagcaacgtctgcagtgctggctcctccagcacctccgtccactggagactcatgaaaggctcctgtgaggcctccctggctcggacctctccatggccggcctcagccctggccttaataatagtcttcctgcaagtggccgtcctttctgggaatgagtgagatccttgccaaggctcaggaggccacacagaacaaagggactgtttctgggggttcttcagctggttgtgccgtgaccatggccattggcgccaagatgcaagccttggggacagggtggacctggttcccacccacagcctcttccctcaggaatccatgctctccctgtgatttggacaatcattttactcacctggatgagaggggcactggcctaggcatcatccaaggtcccttccctctgtaactcactttgacctcctgactgcaataagtatgactggacactataggaggaggcatctctggccttcggatccaggggtatagggagggtgacgggcagtgtcctggggtcagcacttggcattatgcccatgttctcattggctcctcttaccaaccactgattcaaatgccagacaaggctcagcaaggctaagcgactcacatagtctcagcactggtgagaggcagagtcggctcaagcgcatctgctggctgcaagcccagcctccccacactgcaagggagaggagcaggtgtcactcagtgagcggcatcttttggtctcagtcctggaagtgcagggtgggctggtccctaggggctggaccatggaattaagggctccagggatcccctggggccgtggttcctatgcctggcattggacaatgacgatgcccaggacccagcccagccctcctccattagagcctctgggcatcaggctgcccaaggtgcaggctctgatggggaagaaaccggtgccgtcatggggacctcaggtagccagatgtggcctgaggagtctgtgctgtggcctcctctgtcctcaaggttaggctccagctggggaggagtgattcactcttgtaaattacagggaggctccagggaggcagatgctcccagcctgatgactggcagcaattctggggcccttacctaggttctccctgccactgcgggctccgggagctctccatggtgacctaggaactcccctgggtgcttatgctccgccgagagttgctctgttgcacattcattcaacaaacatttgtttagtgcctgtcacatgggctcagagtcagctttttgggttctgatcccagtcagggccacttcctgtggccctgggccatggcttaacgctgagcctcagcctcagaagtgccggccttgtagaggatcgatgccatcgggccagtgctcggctagggctgaggaagcgttggccgctgctggctgtagcatggggagcccagagggctggaggggccccaggcttggtgggcccagggtgcagattgacaggaaagggacagtggtgtgccctgagcagatagaagggatggtggctgcaggatgggttggggaacatgggaggctgggagctgaggctactgggtgctcatgatctctcctctctcctcagtacggcaagaagaagctgaaatacctgccctacaatcaccagcacgaatacttcttcctgagtgagtgctcggcgccccgaaatcactctgggaccctcccctccccccagagtggcgtgtctctccctcctacctgacatctttttcagatccagaaagtgacactaaacttgttagaagcgggggccacagcagccttgctgtgcagacccctcagcctgtgttacaggcctgatggggacacagaggctcagagagtcccaggggtgacacacgtcctcaagggctcccagccttctctgcaggccccggggtccctggctgcttctgcccacgtctgcagggctggcccctgcactcagtgctgggcctgggttcccctgaccttccggcacaggcagcgtggaatggatgcctctaagcgcctgtctctctcctgcagttgggccgccgctgctcatccccatgtatttccagtaccagatcatcatgaccatgatcgtccataagaactgggtggtgagttggggacacagctggcttggcatggggaggagggtgactgggacagggggacccgggggtcctacgctgcctcctcgtgtgccccagtggagcctgtggggccccaggcatctcctccctggggtagctgcctctcaggaaaggactccctctggggccaccaggacctagtcctaaagatctctactctccctcagacatagggagtccactggggcagcccctgcttttgcagagcccccgagaaagttctcaaaggcagcaggatgagaggcaagtgtggccatctcccttccccgctccctgtgggccctgagtcccatgaactgggttgccccacaccctggtttgaagttggagcagctgggcgttggctgagatgacaggtgtggtcgtttgcgaagaccgtatgacaaagcaccacgaactgagtggcataagcagcagcgatgtgttttctcccggttctggagaccggaagtccaaaactgaggtgttagcagggtggattccttagggctctggaaggctctgttctgggcctctcatcggctggttgatggctttcgtcctccctctcggtacatcatctctctgcatatttgtatctgtatctgtgtccaaatatccctctttaaaaaaattattttgtttatttgtttatttattgagacagagtcacataggctggagtgcagtggtgtgatctcgactcactgcaacctctacctcctgggtgcaagcaattcttgtgactcagcctcccaagtacctgggattacaggcaccggccaccatgcccagctaatttttgtatttttagtagagatggggtttttccatgttggcgaggctggtctcgaactcctggcctcaagtgatctgcccgcctcagcctcacaaagtgctgagattacaggcatgagccaccacgcctggcctattttttaattttctttttttcttcaccaaaagtggattcttgaaaatttttccttttttttaaaatagggacattggtcatattgcattagggcccattgtaattacgtcatcttttttttttgagatggtgtttcgctctgtcgcccaggctggagtgcagtggtgcgatctcggctcactgcaacctccgcctcctgggttcaagcgattctcctgcctcaacctcctgagtagctgggagtacaggcgccggccaccatgcctggctaatttttgtatttttagtagtgatggggtttcaccatgttggccaggctggtctcgaactcttgactcgtgatccacccgccttggcctcccaaagtgctgggattacaggcgtgagccactgcacccggcagataaattgtttatctgaaaattatcaaagactaaattgtcactttctgaaatgcttgcttaaaatccagtctttctcagcagtctatttgtccctcatgctccaaccaatagccatggggaagtttttcctctcttaaccaaatgtggacttgtttattgattactgttttttgtttgtttgtttgtttttgaggtggagtttcgctcttgttgcccaggctggagtacaatggcgtgatctcggctcaccgaaacctctgcctcctgggttcgagtaattctcctgcctcagcctccgaagtagctgggattacaggcatgcgccaccatgcccagctaattttgtatttttagcagagacagggtttcaccatgttggtcaggctggtctcaaactcccaacctgaggtgatctgcccacctcagcctcccaaagtgctgggattacaggcgtgagccaccgcgcccggcctgttgattactgttttatcgcttgctaactgaagttgtccttttcaccctgactgtgaatttaagagcagccaagtcaaattttatctccaagtcttggacccatatatccaatctaactccatttggaggtgtcccagccattgcaaatccaacatattcaatgtaagtcctctcctcttctcccacaacctaatcctgatggtctccatgttaatgaatggctccatcatccacccagtggctcaagttagagactagcaccattatgttttttccctccttatacatgttacaccctctccttgcctctagcatccaatcccgttctaactcataagtggcctattgccgggcgcagtcactcatgcttgttatcccagcactttgagaggccgaggcgggcagatcatgaggtcaggagttcgagaccagcctggccagcatggtgaaaccccgtctctactaaaaatacaaaaaattagcctggcatggtggtgtgcacctgtagtcccagctactcaggaggctgaggcaggagaattgcttgaacccgggaggcggagcttgcagtgagcaacttctttttttttgtttgtttttgactgtgcttgttccctaaggaacaaagtattaaacaggaaaagaaatcaccctatgttcctaaaaggggatggcagagtggggacaatgtgatgagcccatggggctttcagagccaggagcgcacctatgacctggggcactggttctcaggggagctgttctgccctttggcagtatccggagacacttttaattgtcacaacttcaggagaggagggtgctactggcatctggtgggcgtctagccaggatggtgcttagcaccctgccatgccctggagaaccgcccatgacaacaagcagcctgtcccaggtgccaatagtgtggaggttgggggaccctggcttagaggaaagaggtgacaaaccctaagatctttgaaggaggcttcccggggagatttacatgctctggcaaggttccctgttcccggggccacgtcctggatcctgagatgctcccacgcttcaccctcctggaattttgctgtatctgacaccactggccactccctcttgcagttcttcctgttggcttccaggtccccacctctgctggcttcttcccaaccccctcgctccgcctctttggctgcttctgatctcttgggctctctgcccctgaaaccagcgatctctgtgtatgtgttgctctctacactcaaaagaagtccaggccaggcatggtggctcacgcctgtgatctcagcactttgggaggctgaggtgggagggatcacctgaagccaggagttttgagaccagcctgagcaacatgggcgaaaccctgtctctacaaaaagctgggcgtggtgatgcgcgcctgtaatctacctactttggaggctgaggtaggaggatggcttgagcccaggagtttgaggctgcagtgagctgtgatcacaccactgcactcaagcctgggcaacagagtgagaccctgtctcttaaaaataaaagttgggccagggcaatggttcacacctgtaatcctagtactttgggaggccaaggctggaggatcacttgagcacaggcattcgagaccagcctgggcaagtaagtgagacccccccatctctataaaaacttaaaaaaaattatccaggtaaggccagacacagtggctcatgcctgtaataccagcactttgggagcctgaggcaggcggatcacaaggtcaggagatcgagaccatcctggcgaacacggtgaaaccccatctccactaaaaatacaaaaaattatccgggcgtggtggcgggcacctgtagacccagctacttgggaggctgaggcaggagaatggtatgaacccaggaggtggagcttgcagtgagccaagatcacaccactgcactctagcctgggcgacagagcgagactccctctcaaaaaaaaaaaaaaaaaaaaaaaaaaaacagaaattagctactcgggaggctgaggtagaagtatggcttgagcctgggacagagtcatgatcacaccattgcactccagcctgggcaataaagcaagatcccatctccaaaaaaaaataatccgtaaccccatcctcattttgtttccatatatgtgtagatacactgcacactattgcaccacacacacagaatagaaggaatgtgatggaaagtgggagcagaactggctacatctgcctccctcctcaccttgaaggccaccttattggaacgtgaggtcctgccctcggccaatgttggccccaaggccatctccagcctctcctgagcgctcccttcctcctttcctgttcagctgctggcacccgacccctgatcacctaggaccagcctagattccccacagccaagcaggcacaaatgcagccaccgttgcctctgacagttctggaatctgtcacctccttgtcagtgccgtgggttctggtttaggcctctgtcatttcatgtctgagccgctggaataacttcctagtctccccctctccagtgggtggggatctattttaagacacaaatgtgaccttgttcttcagtcgtttgaagtgagacagggcagtcccttggcctcaccttccacctcggacacctgtgctgagcctgtggcatgtcaccatacctaaactcatggcaggatgagcgccctggcagtgggaacaggccatgcagaggccccggggagggagtaagctaggtcagggggctgagtaaagacaggttcttaaccccatgaggctccgtgggtgactgggtggggtgggggctttagcaggggagagttgggacctgcttggagcgaaggccactctggttgccatggccacgaggacaagcaggagactgtgggaagctgatgctgtggtccagttgagacaagacttgggtggcagagagacagtggacagggtggagccgtgaagtcaccctcccagtacatgagagaagacgtccaagcccagtccctgacaccagtccagccagaggcagggaggagagcagagtggagggacacaggatgacagtggggcgtggggaggccagcctctgctgtgagagctctgagatagggacgatggtacctctgaccttccctacccctccaagccctctgtcctgctggaaggagatgccaggaggagacccaggtgctgaggaggagggacaggactgggggacggttggggacctggccccgggttgggggcgcaccttcagaatcgcccttgccccacgagagggctgctgacccccacccctaccccatggctgcccctcagcaggagggtccgtttctctcccgaaaaacagggcacagtcacttcctgatgctaaaacactcagcatttccctagaaacaaaggcagccatgcaaaccccgagcaagcaggtggcgtgtagttgcccattgcatttcagtgggctgcggtccagcttctagaggcctgagtgtgaggtgtgtgcacatctggggcacgcacttggtgccagggcagaggagagggcaggttgcacctaacttcatctttccccgcaggacctggcctgggccgtcagctactacatccggttcttcatcacctacatccctttctacggcatcctgggagccctccttttcctcaacttcatcaggtgcctgggctttgctgattcatccctgggccctccactggcactgatgatggctttggcatgagaagaggctcggacggctccactttgcctggggacctcccatcctggccccttggcaggggctgtcctgggctggttgggagagtggatctgttcccactgtggctgggcccccggaggcccctgcgctgagctgtgttctcttgcaggttcctggagagccactggtttgtgtgggtcacacagatgaatcacatcgtcatggagattgaccaggaggcctaccgtgactggttcagtagccaggtagggaagtcagggccggtcaccagagcctggtcccaatgtccatgtcctggccccagatgatctgcacctgctaacacagggctgtgctgggcctcccggggctgcctgtgtccttttgctgggagcttcagggctgagcaagaaagggcagcaggaatcccccagagggacaggtggggcatctgggtgggctgaggccatcaggcaggacggtatgatgtggacgggtggcctggagaccctgggtaaggctgggccccctgggaatgaggccgggcccttgggccttcctttgttccctgacactcatcccctccactgacagctgacagccacctgcaacgtggagcagtccttcttcaacgactggttcagtggacaccttaacttccagattgagcaccagtgagcgcggggctgcggggaggcggggagacccacagcgggagggaagtggccgctatcccactgggcagaatgcagaatgtgggggccacctctttgtctctctgacaaggtctctgcccaatatagagcaaggctcccagccagccccgctgaggtcaggagaggggctcccctattccatctccctgagggtcatcctgtgcccctcatgctgtgccacttggtcatagtggttaccacctccctccatgtgggcctgggactttgtagttatggagcctgcacacgcacctcatgaccctgtgaggctagcagggcagggctacgtagcttgcctggaacatcggccgagggactgccctgctgccccttgtccttgcttcacctcttgtcactgtttttttttttttttattaaaaaataaaaaatgtagagacagagtctcaccctgtttcctgggctggagtgcagtggtgctttcttggctcactgcagcctcgaacgcctgagctaaagtcatcctcccacctcagcctcctgagtagctgggactgcaggtgcgtgccaccatgcccaactaattttttctttttttttttacttttatttatttatttattttgagacagaatctcactctgttgcccagactggagggcagtggcgcaatctcggctcactgcatcctccacctaccaggttcaagcaattctcaggcctcagcctcccacgtagctgggattacaggcgtgtgccaccacgcccagctaatttttgtattttttagtggagacggggtttcaccatgttggccaggctggtctcaaactcctagcctcaagtgatccacctgcgttggcctcccaaagtgctgggattacaggtgtgagccactgcacctggcctaattttttatttttattttttgtagagaagaggtcttgccgtgtcgcccaggctgatctcaaacttctggcctcaagtgatctgcctgcctcggcctcccaaaatgctgggattacaggcgtgagccaccgtgcctcacctcactgcctcttttcctagcattccccagctatttcatttcttttttgaaaaacatgacactttgtctctggccacccaatatcttcccagctccatagagcacaaacgccctcctgctcacggagggctgcaccctcccctccacacacgtggcaccccactgggcacacacgaggagccacactttgagactggtcctggctgtggacagggtctctgagggccccagccagcctctgcccaggtggtgggaggaagcgggagcagcatggccctctgagtcctcacgctctgcccaccctacacactcctcagcctcttccccaccatgccccggcacaacttacacaagatcgccccgctggtgaagtctctatgtgccaagcatggcattgaataccaggagaagccgctactgagggccctgctggacatcatcaggtgaggggtggaggtccacaggcgctgggccctgggatcacccgtggtgcagacagtgggatcacaagaggggctgggccctcctggcacagtcacccaccagggcacctgccttactcccgagcctgtgttaggagctgttgggcttttctccctgggctgcgagaagaccatccctttctgtgtggggttcctggtgggctctgagctgacagccccacaggcccagtggcagtggtaagccctggttagggccaaggggacatacatgccaccttaatgatggcctcctcagcccttgcactccctggggccactcccgtcctggtccctgaccctggtccatccccaactttgcaggtccctgaagaagtctgggaagctgtggctggacgcctaccttcacaaatgaagccacagcccccgggacaccgtggggaaggggtgcaggtggggtgatggccagaggaatgatgggcttttgttctgaggggtgtccgagaggctggtgtatgcactgctcacggaccccatgttggatctttctccctttctcctctcctttttctcttcacatctcccccatagcaccctgccctcatgggacctgccctccctcagccgtcagccatcagccatggccctcccagtgcctcctagccccttcttccaaggagcagagaggtggccaccgggggtggctctgtcctacctccactctctgcccctaaagatgggaggagaccagcggtccatgggtctggcctgtgagtctccccttgcagcctggtcactaggcatcacccccgctttggttcttcagatgctcttggggttcataggggcaggtcctagtcgggcagggcccctgaccctcccggcctggcttcactctccctgacggctgccattggtccaccctttcatagagaggcctgctttgttacaaagctcgggtctccctcctgcagctcggttaagtacccgaggcctctcttaagatgtccagggccccaggcccgcgggcacagccagcccaaaccttgggccctggaagagtcctccaccccatcactagagtgctctgaccctgggctttcacgggccccattccaccgcctccccaacttgagcctgtgaccttgggaccaaagggggagtccctcgtctcttgtgactcagcagaggcagtggccacgttcagggaggggccggctggcctggaggctcagcccaccctccagcttttcctcagggtgtcctgaggtccaagattctggagcaatctgacccttctccaaaggctctgttatcagctgggcagtgccagccaatccctggccatttggccccaggggacgtgggccctgcaggctgcaggagggcactggagctgggaggtctcgtcccagccctccccatctcggggctgctgtgtggacggcgctgcctcaggcactctcctgtctgaacctgcccttactgtgtttaacctgttgctccaggatgcattctgataggagggggcggcagggctgggccttgtgacaatctgcctttcaccacatggccttgcctcggtggccctgactgtcagggagggccagggaggcagagcgggagggagtctcaggaggaggctgccctgaggggctggggagggggtacctcatgaggaccagggtggagctgagaagaggaggaggtgggggctggaggtgctggtagctgaggggacgggcaagtgagaggggagggagggaagtcctgggaggatcctgagctgctgttgcagtctaacccactaatcagttcttagattcaggggaagggcaggcaccaacaactcagaatgggggctttcggggagggcgcctagtccccccagctctaagcagccaggagggacctgcatctaagcatctgggttgccatggcaatggcatgccccccagctactgtatgcccccgacccccgcagaggcagaatgaacccatagggagctgatcgtaatgtttatcatgttacttccccacccctacattttttgaaataaaataaggaattttattctca

SEQ ID NO: 471 - DNA, 29521 bp, Homo sapiens
cttgaaacccctgctgattggtgaactggccccggaggagcccagccaggaccacggcaagaacgtaagtctggcttgcaacctgggtgggggtggagacgaggctgggggtggctgggagtctgagagaggctccccttgccccatgaccagtaactggggctgaggcaggggtgcttttgtcctggaggagccactgtggatcacctgtgttcagggagggcctcagagcctccctgggagccggggtttgacaacaactagtggcgtctcctctctcctggccagtttcattttccttctcctccatcccttttcaggaaggtgccagatgacaatctaggggaaagacaggacagaaacaccgaaaaatgtcatttgatgacaagagtggctttggggtgtgtggtccggggcacctctttgagaaagaatgaccattccctggtcatctgttcattgtctgcaggtcagacgcccccctgggtgctgggcttccaggacagccatgtgtgaaaatagcaacccctgaggtctcatgggctgttgttttgttcaacaatgaagtctccatgtaaatggcggagccgtttatagaagaaagttgggacaggaggcaggggcagggcaggacggggaggagagttgttacaaggagaggagtggtacccacaggctgtgaccagggtggtcatggaagtcccaccctggcctcagcaagctcttcctcctcttgttgccagcctgggccagacccctctgtttagcagagccagggcaggaccagggtctctcccggcctggactcttggccagtcccccaccacccccattgcctctggctttcctgatgagctgcgggccaccctgcaggtccttcaaaggccaatgcccctcctctcaccttgccctccatggcacatgagatcacctgccctgtacccatgccagcccatgcttgtcccctcctgcctccttcgcaagtgggtccatctcccactctcacctccagcacctcctggcctgcggcttccccagctctgctcgtcctgccctgtagctcccttgtccatggccttgctccttggctctctccactgctctccctttctgctgcagatcctgcaccatttagcatccaagctcccaccaggcaccaccagaaccacccttcatagcaccttggtcatgccctgtgggtaccgctcctctccttgtatccactctcctccccgtccggccctgcccctgcctcttgtcccaagttccttcttcctcgcaatgccattgtgttcccagggccctccttgactccgctttgcctccctggctccatgtgcccggggctcacagccccctcctgcctgcctcagctcgccctcctgcactagtttgtgtcgcccccaactcaacccctcaagacccaacagtgtgcgcagagcaagtggtgctctgtttggtggtggaaaatgcaagttttatttttcttttcttttctttctttctttttttttttgagatggagttttgctcttgttacccaggctggagtgcagtgacaccatctcggctcactgcaacctccgcctccaggttcaagcagttctcctgcctcagcctcccatgtagctgggattacaggtgcccatcatcatgcctggctaatttttgtatttttagtagagatggagtttcactatgttggccaggctggtctcgaactcctgacctcaggtgatctgcctgcctcggccacccaaagtgctgggattaaagttttcttttttaaaaaagtgtggtcaaccattttggtcatttgacgtgtacagttcagtggcatcaaataagcacatttacattgttatgtaaccgtcaccaccatccagttctcatcttccccaaattgaaattccacatccattaagcactcactcctcattctcccacctctcagcccctggcaggcaccattctactttctgtctctgaatttggcctctccaaggacctcctgtatatggaatcatacaatatttgtcctttggtgactggcctgtttcccttagcatgatgtcttcaaagttcactcacattgtagcatgtgtcagaatttcctcccttttcaaggctgagtaatattccattgcatggatagaccacgtgttgctgatccattcatccatcacgagatctttgtgttgtttctacctttttcctgatgtgaatagagctatgaacacagggtgtataaaatgcaagcttttgagtcaaagcctttctctgtcactcttacctagctgtgacaaatatacaggccccagggctgtgtggggcatgtggtaacagcagctattgtagggactcctggagggtcgaggcttgtggcttggccccctcttgccacagcttctctgggttgtgcattggctgttgaaatggcagctcgagacatatgttccctccagagtggctggtggctgactcctttccctgtgctcttggtcaacagtcaaagatcactgaggacttccgggccctgaggaagacggctgaggacatgaacctgttcaagaccaaccacgtgttcttcctcctcctcctggcccacatcatcgccctggagagcattgcatggttcactgtcttttactttggcaatggctggattcctaccctcatcacggcctttgtccttgctacctctcaggtgaggcgtgacaccctcacttcccctagctgacagaggcctggtgcctgtttgctgaggctgtgacagcacgtgtgaccctctctccccaggcccaagctggatggctgcaacatgattatggccacctgtctgtctacagaaaacccaagtggaaccaccttgtccacaaattcgtcattggccacttaaaggtaagtgtcagcagccctgggcatctgtcctgttggacagcagttgagacagagggaccaggattcctctctgctcagtgctctgaggctacagggtgacaaggcaggtgtgcctatgctgagggccatggtgactctccattctgctgacttcctgagccctgtctctggatcaggtccgaaccacaaagccatggtgtactactcattatgaagacaggcacacacctttcttgtcttttggctcagcggattgtattttttgatgttccttagctaaggactcatctaacaaatctgtttttgtttggggacagtaaagtagcagtatttttttttttttttgagacagagtcctgctcttgtcacccaagctggaagcaatggtgtgatcttgggtcactgcaacctccacctccgggttcaagcaattctcctgcctcagcctcccgagtagctgggattacaggcactcgccaccatgcctgactaatttttgtatttttagtagagatggggttttgctatgttggtcaggccggtatcaaacttctgaccttgtgatctacctgccttggcctcccaaagtgctgggattacaggtgtgagccaccgcatccggcctgtagcatcttttttgatgagttggtatgcttcctttcactggggatgtgagctctttaatacgttgtgctgggtgtggtggcatgcacctgtaatcccagccacctgggaggctgaggcaggagaattgcttgagcccaggagttcgagaccagcctgggcaacatagtgagacccccccccatctctcaaaaaaaaaaaagaaaaagaaacacattgtgctcctctcttcccctcagaagccaagaggtacaaagcagcatttgaaacagcaactatctttagtctgtgtttttggtgcccccattctctccttcctcatctggcatttatgcttttatctttattttagccttccgttatatatgagtcttttatctcaagccacttcaaatactctttggaaataagcggggtacaaaaagtaaaagtcatcctataaggcctcagataggggacaccaaactacggaatgatcagctggcccaaaggacaaaagtcattagaagtgcaggagttaaggaagttccactctcacctccccctagataaggaagcagaccacagagtctcagcatgtttgtagaaagacaagctggaattgccaactgccttgttctgatctgacaggcgttatctcctcagttttgaaaatgagtctttgccaacttgctctctgaaatagactatccccatcccagcctgacccaacagtacctgcttcctgagaaaagctgggtcctaaagaatccatccctccacaccctggcaagggacgagctacatgtggggtgtagcttatcccctcttccacccagaccgcaacggggcccttggcttgccggctgcagatctcactggtggccaaccacccctgagctggtcaccagtttcgcagcgagcagcttgcctggccctgagcctgaagtggcctgagaacctggtctctgtccagaatctcaggggcaaagggagagggtgcacatagtggagtgctttgtttcattttatactcttctctgttggatcaaaccctcctcagtatggcaaagtaacatttaactcctgacccatgttagcccccacacacttaacaaagatgggctgtgtcctgcttccagattctgggcaggggccgggcaggggggattgttcctgtccaattgccctcagtctttgaggggccccagagcacggctgttgcgtcaggcgggagacggggccaggacagaggactggtctccatgtagaacgtggatgacagcaaacagggtccttgggcttggggatgtgggctccactcatggcccaccagcccccactggctgtgtccttggtgctgtgtcacagagacaggccaaggacatggacatgtggctcactcaggggtgccccagagcacggaggtcaagcttgcctgaaattggctctagcactcggcaggtgcacagccatggggacaaatcttgtaggtctgtgtctcttcccatcactgggaaaaaggggactggctacagggaggtcctcaagggcctcgccaactcagatgtcttagcacaggctggaaagacctgtgagtaggttaccaggtgctgtgagaggctgggacccccttcttcctgttggctgcactgctaatgggatttaatgggagttcttcacatcctgacctgtttgccttcagcccgtgtcatgcccagtggacatttcttccaaagtgtgatcttttacaaagacgattctgaggttaaaactctttcgtagttcagcactgtacttaggatgaaatgcaaacttcagccaggcacagtggctcacgcctataacctcagcgctttgggaggtcaaggcaggaggattgcttgaagccaagagtttgagaccagcctgggccacatagcaagaccctgtctctactaaaaataaaaaaattagccggggatggtggtgcatgcttgtagtcccagctactggggaggctgaggccggaggatggcttgagcctgggatttgaaggctgcggtgagctgtgatggtgccactacattccagcatgggtgacagagtgagacactgtctctaaataaataaatgcaagctgaaaggcccagtgccatctgggcgctgcatctggaaatggacatcaccagactttctgcagcctcatctcaggccaccagggctgggattagggtgaaacaagtaaggcactcgcttagggtataaaatctaaggggacaccagacaaattctaaggggacaccagacaaattcagttatcaagataaatgatgttttaatgcaatgtggttttgttttgttttttgagatggagtttcactcttgtcgcccaggctggagtgcaatggcgtgatctcaactcactgaaacctccgtctcccgggttcaagcgattctcctgcctcagcctcccgagtagctgggattacaggtgtgcgccactatgcccagctaatttttttgtatttttagtagagatggggtttctccatgttgtccaggctggtcttgaactcctgacctaaggtgatccacctgccttggcctcccaaagtgctgagattacaggcatgagccaccacgcccggcctgcaatatgtttttaaaaaaatcaaaattaatgcaaaaaaatccacaatgaacaaaatatcaaaattttaaataaagatcaggatgaactgagggaaatggaaaaacatgcaaccctctaaacatgttcgtgtgtcattttttaatggttgattttttttccagaggattaaagtaaataaaaaaatatttaacaatgaagaagttgatgtattaaaagtcataacattctaagtgtaaatgctttatttataccaaaacaaaacttattatacttttgcttcagttgaatgtaattagaaattagttaagaccgggcgaggtggcttggccgggtgtggtggctcatgcctgtaatcccagcactttgggagggtgacgcaggtagatcacttaaggtcaggagttcaagaccagcctggccaacatggtgaaaccctgtctctactaaaaaaacaaaaattagccaggcgagggtgctcgggaggctaagacaggagaatcacttgaaccagggaggtggaggttgcagtgagccgagatcgtgccacagccctccagcctgggtgacagagtgaggctccatctcaaaaataaaaaataaacataaaaattatttaagctaatcgcttggttgacagaaaccatcaaactcagcaattctttccattgaaaatgaaatgaggccaggcgcggtggctcacgcctgtaatcccagcactttgggaggttgaggagggcagatcacaaggtcagaagatcgagaccatcctggctaacacggtgaaaccccatctccactaaaaatacaaaaaattagccgggcgtggtggcacacgcctgcagtcccagctgctcgggaggctgagacaggagaatcacttgaacccgggaggtagaggttgcagtgagccgagactgcatcactgccctccagcctgggcgacagaggaagactccgtctcaaaaaaaaaaaagaaagaagaaaaaagaaagaaaatgaaatgaggcaaaaagtaggctttgaaaatgttatcgatgagtttgtttccattaaagccagaagtgcactttttttttttttttttttttttttttttgcctcaggctctgatatggcgccacccagcactgctggtcacagttataccgaggagctttcctctggcttctggagcactctacactcccccttcctctcccagggcctcccgtaggctcttgcctctgtcaggaaagcacccctcactctgcctggccaacttctccagctgcgtggacacttagctttcctggccccagctcagtttgggtttggtgtgatgaggccagaccctccctcgcagctccgtgaggacaagggctttgtctcttggttcacctcccaggcagagcatggcagctggcttagggtaggcaacatctgcaccacattctgggaacacggagctggccattgttcctgggcaaggcgggcttcccggtgcccggaaggaggggctcttgaaggacaagcagggcttcacctggcaaagaagaatggaagagaggcccggtgcggtgggttatgcctgtaatcccagcactttgggaggcggaggtgggcggatcacctgggttcaggagtttgagaccagcctggccaacatggtgaaaccccatctctactgaaaatataaaaattagccgggcatggtggcgggcgcctataatctcagctactcggaaggctgaggtaggagaacctgggaggcggaggttgcagtgagctgagattgcaccactgcactccagcctgggcgacaagagcaaaactctgtctcaaaaaaaaaaaaaaaaaaaaaggaagagaatcacagcagaggaagtagcatgaacaaaaaatgctttcattacatctcatcccgagtccagggagaaccgggactgcccacctcactgcctccttgttgtcagcccgtcttgctttcctccatctgtttgttcaataaacatctctgggttggtatcctccaaacatcacgcttacttgtttcatgccttgctcctcagtttctttgtgccagagatttttccatttgattcttcccaggaattttgttccttttgacaacaaacgcaaatgtgtcatttgattcctcgagcctctaagctttctttctttcttttctttttttttttttttttgagacagactcttgctctgttgctcaggctaaagtgaagttggtatgatcttggcctcctgggttcacaggattctcctgcctcagactcctgagtagttgggattacaggtgcccgccaccatgcccagataatttttgtagttttagtagagacggggtttctccgtgttggccaggctggccttgaacgcctgacctcaagtgatccacacgcttcagcctcccaaagtgaagcctctgagctttcactctctgacttttttttttttttttctctctctctctctctcatgggttttgaggcctgccagtttccagggccctgaggttactgcaaaggccacagctgtccgttgctgttcccacccatggctattagtgtccatagactgtgtgtgccaaaagcatctcccaagtaaaatgtttgtttagcaaataggcattttttgcaaacccttagccaaagcattgatccggcaacagttcaccaggatagtcgtgatgccaaagggtcaggaaagtgtgttttctttcatctgtcgctgggcaactgtcgagggccataactctgagctgaggagacggacacctgtggcctcaaaagaaatatccatgttatgtgtcttgtctcatgggatcctatttgagtgttagaaacaggaaagttcttcttgttcatgttagcagttgtttgttgagccctccctccagccttcctggtgtgacacgaatctcaggacccaccctcagcatagcagcacaactgcgctctccaaatcgtttattgagatacagttctcactttttttttttttaaacagagtcttgctctgtctcccaggctggagtgcagtggtgtgatctctgcctcccgggttcaagtgattttcctgcctcagcctcccgagtagctgggattacaggcgcccacaaccacgcccggctaatttttgtatttttagtagaggcggggtttcaccatgttgcccaggctggtctcaaactcctgacctcaagtgatccacccgcttctgtctcccaaagtgctggaattacaggtgtgagccaccacgcccagccagttttcccatttaaagtagacaaatcaatgacttttggtatattcacagatttatgcaaccatcatcatagtcgattttagagcatcttcatgatgctcaaaagaaaccccacgtttcttagccatcacatcccaaccccctcactccctcccctaccccaatcctagccctacacaactgctcagctttctgtctctatagatttccctattctgggcgtttcatgtcggtggaatcatgtgatatgtggtcttttgtggctccttccttcccttagcatgttctccaggctcatccgtgttgtagcaagggtcagtgattcgttctgttttacggcacagccaaatgatattccactgtgtggataatctgcatttcattcacccactcatctgttgatgaacatttgtgttgcttttgctcttctggttcttttgaagaatgctgctgtgaacactgctctatgagttggtgtgtggacatgttttcatttctcttggatatacgctcaggagggagatttctgggccacatagtagggaccacttctcactgtccctgaaacctcggctttaccttgcacagctctggttccacacctggtgacggagaggcagagactggctgccacacctgctggagcgctcaccgtgtggtccctcagcagcacgcctcatctgccaccatcgtcttatgatcagggaaactgaagcctagagagataaagtgacttcactccatctggggctggcgcatgctctgagctcagtcatggcagggctggattctggccttgtgggggcctgaagtgctatccccgagggttgaaggttccgggaactgctcctaagaagggcctgttacaagcgagctcggttccctggtggcttgcatggctcatccccacccctctctccccacagggtgcctctgccaactggtggaatcatcgccacttccagcaccacgccaagcctaacatcttccacaaggatcccgatgtgaacatgctgcacgtgtttgttctgggcgaatggcagcccatcgaggtacgactaagaggatggtgttgacctaggaagtgtttgtcctgggggaatggcagaccatcgaggtacaactaaggagatggtgttgacctaggaagtgtttggcctgggcgaatggcagccatcgaggtacgactaaggggttggtgttgacctaggaagtgtttggcctgagcagggagcagggaaggaagcctagagagctgacattcagccaggcaggtccacatctcctgctacacagatacctctcctaggtaccctgaattgttctggctggaatgtatgtggaatggcctcacctgtaaatacagacacagctcctcattagaatggtagatgtctccctcctacccttaggccaggaagggcattttctggcttgttttttcccagggtagagggaaatcttgttccagttcagcaggaaggcaagatttcaggggctcaagcttggtcgccaaccgactagctcatgttgagaaaaccttatttggagaatcatcatcctgtacactgggaggagcctcaacgtggcttggtccaatctgcttcaccagtggataagaaattgaaggtcagcgagaggatggaacacgttcagggtcacataatttatttagttttttttctgagacggagtcttgctctgttgcccagagctggagtgcagtggcacaatcttggctcactgcaacctccgcctcctgggttcaagcaattctcctgcctccgcctcccacgtagctgggattacaggcatgtgccaccatgccaactaatttttgtatttttagtagagacagggtttcaccatggccaggctggtctcaaactcctgacctcatgatctgcctgcctcggcttcccaaagtgctggtattacaggcatgagccaacgtgcccagccgagagagtcacgtaatttagtggccagtctagggtgaggccccagacctttggactgctaggccattgccttccatttactataccattttattttcatattagttcattttattactacaaatatagaacacacttggtataaacttctaaacagtacagaaatatccagaattaaaacacgagtctcagcctgggcaatatagcaagaccctgtctctaaaaaaatacatatttttttagttagccaggcatggtagcacgtgcctagtctcagttattggggaggctgaggtgggtggatcccttgacctgagcccaggaggttgaggctacagtgagctatgatcacaccactgcactccagcctgggtaacagagcaaagctatgtctcaaaaaagaaaaaaaaagtgagtctctcaaacctcccctttgccccaaattttatgcccttgagggtaaccactgttaacaagatgctatacagtcttctagatatttttatatgtgtataaacatgcatatatctgtttctttacaaacaaaaattttaggccagctgtggtggctcacacctgtaatcccagcgctttgggaggctgaagtgggagaagtgcttgagcccaggagttcaagaccagcctgggctacatagtgagaccccatctctgcgaaaaatacaaaagattagccaggtgtagtggtgtgcgtctgtggtcccaggtgcaggggaggctgaggtgggggaatcacttgagcctgggagcctcaaggctgcaatgagctatgattgcaccactgcactccagcggggacagaagagggagactctgtctcaaaaataaaaaaataaaaaacaaaaaaattctaccttgtatcctgcaacttgccacctctgcgaatgtggatgcccttcccccccagttcatgtagacaggtctcgtctccctctagccatatggtattctgttgtacttctgaaccataacaggacctacattattttataaggtagacaaattgagtgtcagtagttcataatttctttcttttcttttcttttcttttttttttgagacagagtcttactctcttgcccagtctagagtgcagtggcacgatcttggctcactgcaacctccacctcccaggttcaagtgattctcctgcctcagcctcccgagtagatgggattacaggtgcacaccaccacgcctggctaattttctcatttttagtagagacggggtttcaccatgttggccaggctggtcttgaactcctgacttcgtgatccgcccacctcgccctcccaaagtgctgggattacgggtgtaagccaccgcgcctggcccataatttcttttgaataaaagccccaccaatgcgttccacaaaaaaatgttcttatttaatacattctttttttttatgtagagcctctatgtcgggacctaatttagaagaaaaaaataaatatatgcgctgctttttggaaatacattaatgattaaaatgaaagtttagaagatccttgttgcttttatgcagatcttaggagccacaaagccatgcatagagtagggttcaatcagcatctgccaagtgaggccaattttccctcactaaggagtggcaccgtgagtgaagtagtattcccgacagccttggcgcctaaggcttggaacaaggcgaggagacagcctggctccccagttctggtttgtacaccctcttcttatttcatttccacccgtgagactatctgagcaggaacgtggatttttctgtaacatggccaattcgcaggaaatcagccacagttctgtactttggaagcctctctaagctgccagggattccattttctgccaaagtacaggctattgttattcttctaggaaacagtttgccagctttaattagaggtgtctagaaaacggaactgatgaacttgaggccctctgataagtggggacaaaggcttcattttctcggcgaggctttgtaatgtagagccgttggctgtcctgacagatgttctctgtgtctccaacaaagaaagtctagtcccaccagctgcactggcaagaaggcgtctttcttgtgcgtggtggccagagaagcctctcctttcccgacatcttctcacccccgacacttccggaacgctggctttggggcaggagataggggtgggaggctgtgaggatctggttgttcagttaccagcggcgtttggaagtccccagccagtgccgcggtgttctgtggaaatccccgctctcacactcatggggaaaggattggtgcttcctgggttcctggtgttttgacctgtgctctggctctcgcaggacccggccgccctggaaggaaccctggtctcttgactgaagtgacagtgggtctgatgggacttgtcacatgccagtcccacacaccacagcagggccaggtggggcggccaggtcccagggcctcaagccaccatcccagtctccagagcaaggatgccggccagggcttctatctctggggacagataagcaaagcagccctgccaagcggctcccagcacgtggaactgtgaatagcgcgggctccgcagtaaagcccttttcctcgttttctgcattttggtcttattgatgctgtccaggaggattctttttgtcatatgtagcaaagtatattcactttacccagagattcatttcttgtgtgcttagaaagttcttcatacatattattttcagttctttaaggttttgtgtttcaatctttaacttctgccaaatgggatatgggtaggatgatgttcggccttcacttttctccagagtcggccagttttcccggcacccccatgaggtggcattgcttcttcatatgaggcagtgagtgctcctgagcccgggcttggcctgggctgggctgtctgtcctctcccaggccaccgtctggatgacttgggggccacactcacactcattcatccttggcacttaactcattggaagctcgtagtggggtgcctttccccttctctttctctctctttttgtttttgtttttgtttttgagacaaggtcatgctctgtcaccttggctagagcgtagtggcgcaatctcggttcactgcagcctcaacctcctgggctcaagccatcgttctgcctcagcctcccgagtagctgggactacaggcacccgccaccatgcctggctaattcttgtatttttagtagagatggggtttcaccatgttggccaggctggtctcgaactcctgacctcaagtgatccgcctacctcagcttcccaaagtgctgggattacaggcatgagccactgtgcccggccaaggtctgtacttctttatatgtctcatggatgtttcttttaaaacgcaatccttatatgttttatattttgtcattatgattggaggttctccagtactcgggaaagcagtggatattggggtagttatcttaattttcttttttttctaaatttttgtttgcatggccttccaatgaatgggatagttatcttttgtcccgctagtgtccacttacgtctcttcgtaattctagttgtgtttcggttgattcttttgagtttcctgggtagatgatcatatcctagaaaataatgaaaacgtagtctctcggcccagcgtggtggctcacatctgtaatcccagcactttgggaggccgaggctggcggatcacgaggtcaggagatcgagaccatcttggctaacacaatgaaaccaccgtctctactaaaaatacaaaaaattagctgggcatggtggcacacgcctgtagtctcggctactctggaggctgaggcaagagaatcgcttgaacctgggaggcggaggttgcagtgagctgagatagcaccactgcactccagcctgggcgacagagtgagactccgtctcaaaacaacaacaacaacaacaaaacaaaacaaaacaaacagaaaaaaagtgtagtcactctttctttcttctctttctttctctctctctttctttccctccctccctcccttccctccctccctcccttccttccttccttccttccttccttccttccttcctttccttctttctttctaatctggatgttgaagtagtctctttctttctaatagctccactctgttttctgctttgggttttattgcattgacgggaaatttcagagctgagtttaatagcggtgatattggcagcagccttgttttgttcttcttttgccatatccccgttttctgagggggctggtgagaccattatcccggtagcagtgtaaaggggcctcagaagccgtgccgtgcctgagatcctcctcctcctcccatccgggaaaccacctctgctgctctgactgtctgaagctaacctcctgggcttcctgcttgaggcagaccttcatgaacaggcttaagccacccatcccgccttgggacacacatgccgccctctcagggaccttggactgggaccttgccattctgctcctgctggggaggtcgtgccgcctgtttctctctgtgtgtgagtttgcaggttcccagaggcagagactgggctttgcgacagctcccctcccccaaccctcgatggacaaggagggcccttgtcattcctcagacattttgttccaaagctgaaaggtcccctccacatggcccggcatcccccaggccctcatccaagcctggccttgaggtgcatggagaggccgaggacaggagagtcagccccgccgccagggctggctgcactccctcccttgcccctggcctgcgtctctgcctgtcaaccgcagcctgggaaggcactgttcctgatcagggggaggtccatgtgtgccacccacacccttggccgcagcccagccaggtgaaagtcatgtgtcttccttgcctcttgggctttctctgtgtgtgtgacggggactcctctggaggaggagatgtgtggggtcctccactccccacacttggggctctgagcccccagttgggaagaagcctgactcttgttgagtgagtctgtggaccgggcactgtgatgggcagtgtgcgtgcacaacgtcacttaatccttgcttaacccgtgaggcgggagctgtcatcgacccatttcatggatggaacagctaaggccaagagacatgaagtgacttgttcaaggtaacagcaaggaaaaggcaacaccactgtccgaacccaaaccatctggctgcaaaccacagcttcggagtcctgggggcccttgtgaaatatgtttgttgggtagccccagctttctgatcaattaaacagccaggcactcacccccctagcttgctacattctaaaatacctctccctcccttccctggtcccatgacttaaacggcaaagctctggcaaagaactgagcgtgggaaagatgagagcagagagttagccacagggcagggcttcgtatcccaaacccacagttgtactttctggtttgggaggggagtactggccatcccccagcagagccgctgcagctgaggccatcgagatgggcacagatgtgtagtggtatgtcaccatacgcatgtacatacacgtgcgtgactgtgatgagcattttgctcaccgtcccacagaggcccactctgaggcctgctgctgcctggcaagcaggaccccctggctcccgagggtcattctggggcattgaagggacgcacactaaagccagcagtgcttaccagcagaggcagcccctgtaacctgtgttgtccacccacaggccaccatcacccatgagaacagggtgcctactgtgcacatgcagctccaaacagactccccaggtgcctcccaggcccccacaacagcgtggccagccctcagtccctccataggatgccctggcccctgctgacctgcctgggttgccctctgtgctcacttccgagtacagccggcccagcccgagagggatgggatgctctgtgggacagagatgcggtggggaggagctcttgagcagagctggagacactgcatgccaaggctggggctatgagcctgctccctggcctctgggagaagcttagagcaggactcaggggcctgttctgtgggccactgcaggccccgagactggccacctcgagagcaacgtctgcagtgctggctcctccagcacctccgtccactggagactcatgaaaggctcctgtgaggcctccctggctcggacctctccatggccggcctcagccctggccttaataatagtcttcctgcaagtggccgtcctttctgggaatgagtgagatccttgccaaggctcaggaggccacacagaacaaagggactgtttctgggggttcttcagctggttgtgccgtgaccatggccattggcgccaagatgcaagtcttggggacagggtggacctggttcccacccacagcctcttccctcaggaatccatgctctccctgtgatttggacaatcattttactcacctggatgagaggggcactggcctaggcatcatccaaggtcccttccctctgtaactcactttgacctcctgactgcaataagtatgactggacactataggaggaggcatctctggccttcggatccaggggtatagggagggtgacgggcagtgtcctggggtcagcacttggcattatgcccatgttctcattggctcctcttaccaaccactgattcaaatgccagacaaggctcagcaaggctaagcgactcacatagtctcagcactggtgagaggcagagtcggctcaagcgcatctgctggctgcaagcccagcctccccacactgcaagggagaggagcaggtgtcactcagtgagcggcatcttttggtctcagtcctggaagtgcagggtgggctggtccctaggggctggaccatggaattaagggctccagggatcccctggggccgtggttcctatgcctggcattggacaatgacgatgcccaggacccagcccagccctcctccattagagcctctgggcatcaggctgcccaaggtgcaggctctgatggggaagaaaccggtgccgtcatggggacctcaggtagccagatgtggcctgaggagtctgtgctgtggcctcctctgtcctcaaggttaggctccagctggggaggagtgattcactcttgtaaattacagggaggctccagggaggcagatgctcccagcctgatgactggcagcaattctggggcccttacctaggttctccctgccactgcgggctccgggagctctccatggtgacctaggaactcccctgggtgcttatgctccgccgagagttgctctgttgcacattcattcaacaaacatttgtttagtgcctgtcacatgggctcagagtcagctttttgggttctgatcccagtcagggccacttcctgtggccttgggccatggcttaacgctgagcctcagcctcagaagtgccggccttgtagaggatcgatgccatcgggccagtgctcggctagggctgaggaagcgttggccgctgctggctgtagcatggggagcccagagggctggaggggccccaggcttggtgggcccagggtgcagattgacaggaaagggacagtggtgtgccctgagcagatagaagggatggtggctgcaggacgggttggggaacatgggaggctgggagctgaggctactgggtgctcatgatctctcctctctcctcagtacggcaagaagaagctgaaatacctgccctacaatcaccagcacgaatacttcttcctgagtgagtgctcggcgccccgaaatcactctgggaccctcccctccccccagagtggcgtgtctctccctcctacctgacatctttttcagatccagaaagtgacactaaacttgttagaagcgggggccacagcagccttgctgtgcagacccctcagcctgtgttacaggcctgatggggacacagaggctcagagagtcccaggggtgacacacgtcctcaagggctcccagccttctctgcaggccccggggtccctggctgcttctgcccacgtctgcagggctggcccctgcactcagtgctgggcctgggttcccctgaccttccggcacaggcagcgtggaatggatgcctctaagcgcctgtctctctcctgcagttgggccgccgctgctcatccccatgtatttccagtaccagatcatcatgaccatgatcgtccataagaactgggtggtgagttggggacacagctggcttggcatggggaggagggtgactgggacagggggacccgggggtcctacgctgcctcctcgtgtgccccagtggagcctgtggggccccaggcatctcctccctggggtagctgcctctcaggaaaggactccctctggggccaccaggacctagtcctaaagatctctactctccctcagacatagggagtccactggggcagcccctgcttttgcagagcccccgagaaagttctcaaaggcagcaggatgagaggcaagtgtggccatctcccttccccgctccctgtgggccctgagtcccatgaactgggttgccccacaccctggtttgaagttggagcagctgggcgttggctgagatgacaggtgtggtcgtttgcgaagaccgtatgacaaagcaccacgaactgagtggcataagcagcagcgatgtgttttctcccggttctggagaccggaagtccaaaactgaggtgttagcagggtggattccttagggctctggaaggctctgttctgggcctctcatcggctggttgatggctttcgtcctccctctcggtacatcatctctctgcatatttgtatctgtatctgtgtccaaatatccctctttaaaaaaattattttgtttatttgtttatttattgagacagagtcacataggctggagtgcagtggtgtgatctcgactcaactgcaacctctacctcctgggtgcaagcaattcttgtgactcagcctcccaagtacctgggattacaggcaccggccaccatgcccagctaatttttgtatttttagtagagatggggtttttccatgttggcgaggctggtctcgaactcctggcctcaagtgatctgcccgcctcagcctcacaaagtgctgagattacaggcatgagccaccacgcctggcctattttttaattttctttttttcttcaccaaaagtggattcttgaaaatttttccttttttttaaaatagggacattggtcatattgcattagggcccattgtaattacgtcatcttttttttttgagatggtgtttcgctctgtcgcccaggctggagtgcagtggtgcgatctcggctcactgcaacctccgcctcctgggttcaagcgattctcctgcctcaacctcctgagtagctgggagtacaggcgccagccaccatgcctggctaatttttgtatttttagtagtgatggggtttcaccatgttggccagggtggtctcgaactcttgactcgtgatccacccgccttggcctcccaaagtgctgggattacaggcgtgagccactgcacccggcagataaattgtttatctgaaaattatcaaagactaaattgtcactttctgaaatgcttgcttaaaatccagtctttctcagcagtctatttgtccctcatgctccaaccaatagccatggggaagtttttcctctcttaaccaaatgtggacttgtttattgattactgttttttgtttgtttgtttgtttttgaggtggagtttcgctcttgttgcccaggctggagtacaatggcgtgatctcggctcaccgaaacctctgcctcctgggttcgagtaattctcctgcctcagcctccgaagtagctgggattacaggcatgcgccaccatgcccagctaattttgtatttttagcagagacagggtttcaccatgttggtcaggctggtctcaaactcccaacctgaggtgatctgcccacctcagcctcccaaagtgctgggattacaggcgtgagccaccgcgcccggcctgttgattactgttttatcgcttgctaactgaagttgtccttttcaccctgactgtgaatttaagagcagccaagtcaaattttatctccaattcttggacccatatatccaatctaactccatttggaggtgtcccagccatttcaaatccaacatattcaatgtaagtcctctcctcttctcccacaacctaatcctgatggtctccatgttaatgaatggctccatcatccacccagtggctcaagttagagactagcaccattatgttttttccctccttatacatgttacaccctctccttgcctctagcatccaatcccgttctaactcataagtggcctattgccgggcgcagtcactcatgcttgttatcccagcactttgagaggccgaggcgggcagatcatgaggtcaggagttcgagaccagcctggccagcatggtgaaaccccgtctctactaaaaatacaaaaaattagcctggcatcgtggtgtgcacctgtagtcccagctactcaggaggctgaggcaggagaattgcttgaacccgggaggcggagcttgcagtgagcaacttcttttttttgtttgtttttgactgtgcttgttccctaaggaacaaagtattaaacaggaaaagaaatcaccctgtgttcctaaaaggggatggcagagtggggacaatgtgatgagcccatggggctttcagagccaggagcgcacctatgacctggggcactggttctcaggggagctgttctgccctttggcagtatccggagacacttttaattgtcacaacttcaggagaggagggtgctactggcatctggtgggcgtctagccaggatggtgcttagcaccctgccatgccctggagaaccgcccatgacaacaagcagcctgtcccaggtgccaatagtgtggaggttgggggaccctggcttagaggaaagaggtgacaaaccctaagatctctgaaggaggcttcccggggaggtttacatgctctggcaaggttccctgttcccggggccacgtcctggaccctgagatgctcccacgcttcaccctcctggaattttgctgtatctgacaccactggccactccctcttgcagttcttcctgttggcttccaggtccccacctctgctggcttcttcccaaccccctcgctccgcctctttggctgcttctgatctcttgggctctctgcccctgaaaccagcgatctctgtgtatgtgttgctctctacactcaaaagaagtccaggccaggcatggtggctcacgcctgtgatctcagcactttgggaggctgaggtgggagggatcacctgaagccaggagttttgagaccagcctgagcaacatgggcgaaaccctgtctctacaaaaagctgggcgtggtgatgcgcgcctgtaatctagctactttggaggctgaggtaggaggatggcttgagcccaggagtttgaggctgcagtgagctgtgatcacaccactgcactcaagcctgggcaacagagtgagaccctgtctcttaaaaataaaagttgggccagggcaatggttcacacctgtaatcctagtactttgggaggccaaggctggaggatcacttgagcacaggcattcgagaccagcctgggcaaataagtgagacccccccatctctataaaaacttaaaaaaaattatccaggtaaggccagacacagtggctcatgcctgtaataccagcactttgggagcctgaggcaggcggatcacaaggtcaggagatcgagaccatcctggcgaacacggtgaaaccccatctccactaaaaatacaaaaaattatccgggcgtggtggcgggcacctgtagacccagctacttgggaggctgaggcaggagaatggtatgaacccaggaggtggagcttgcagtgagccaagatcacaccactgcactctagcctgggcgacagagcgagactccctctcaaaaaaaaaaaaaaaaaaaaaaaaaacagaaattagctactcgggaggctgaggtagaagtatggcttgagcctgggacagagtcatgatcacaccactgcactccagcctgggcaataaagcaagatcccatctccaaaaaaaaaaaatccgtaaccccatcctcattttgtttccatatatgtgtagatacactgcacactattgcaccacacacacagaatagaaggaatgtgatggaaagtgggagcagaactggctacatctgcctccctcctcaccttgaaggccaccttattggaacatgaggtcctgccctcggccaatgttggccccaaggccatctccggcctctcctgagcgctcccttcctcctttcctgttcagctgctggcacccgacccctgatcacctaggaccagcctagattccccacagccaagcaggcacaaatgcagccaccgttgcctctgacagttctggaatctgtcacctccttgtcagcgccgtgggttctggtttaggcctctgtcatttcatgtctgagccgctggaataacttcctagtctccccctctccagtgggtggggatctattttaagacacaaatgtgaccttgttcttcagtcgtttgaagtgagacagggcagtcccttggcctcaccttccacctcggacacctgtgctgagcctgtggcatgtcaccatacctaaactcatggcaggatgagcgccctggcagtgggaacaggccatgcagaggccccggggagggagtaagctaggtcagggggctgagtaaagacaggttcttaaccccatgaggctccgtgggtgactctgggtgggatgggggctttagcaggggagagttgggacctgcttggagcgaaggccactctggttgccatggccacgaggacaagcaggggactgtgggaagctgatgctgtggtccagttgagacaagacttgggtggcagagagacagtggacagggtggagccgtgaagtcaccctcccagtacatgagagaagacgtccaagcccagtccctgacaccagtccagccagaggcagggaggagagcagagtggagggacacaggatgacagtggggcgtggggaggccagcctctgctgtgagagctctgagatagggacgatggtacctctgaccttccctacccctccaagccctctgtcctgctggaaggagatgccaggaggagacccaggtgctgaggaggagggacaggactgggggacggttggggacctggccccaggttgggggcgcaccttcagaatcgcccttgccccacgagagggctgctgacccccacccctaccccatggctgcccctcagcaggagggtccgtttctctcccgaaaaacagggcacagtcacttcctgatgctaaaacactcagcatttccctagaaacaaaggcagccatgcaaaccccgagcaagcaggtggcgtgtagttgcccattgcatttcagtgggctgcggtccagcttctagaggcctgagtgtgaggtgtgtgcacatctggggcacgcacttggtgccagggcagaggagagggcaggttgcacctaacttcatctttccccgcaggacctggcctgggccgtcagctactacatccggttcttcatcacctacatccctttctacggcatcctgggagccctccttttcctcaacttcatcaggtgcctgggctttgctgattcatccctgggccctccactggcactgatgatggctttggcatgagaagaggctcggacggctccactttgcctggggacctcccatcctggccccttggcaggggctgtcctgggctggttgggagagtggatctgttcccactgtggctgggcccccggaggcccctgcgctgagctgtgttctcttgcaggttcctggagagccactggtttgtgtgggtcacacagatgaatcacatcgtcatggagattgaccaggaggcctaccgtgactggttcagtagccaggtagggaagtcagggccggtcaccagagcctggtcccaatgtccatgtcctggccccagatgatctgcacctgctaacacagggctgtgctgggcctcccggggctgcctgtgtccttttgctgggagcttcagggctgagcaagaaagggcagcaggaatcccccagagggacaggtggggcatctgggtgggctgaggccatcaggcaggacggtatgatgtggacgggtggcctggagaccctgggtaaggctgggccccctgggaatgaggccgggcccttgggccttcctttgttccctgacactcatcccctccactgacagctgacagccacctgcaacgtggagcagtccttcttcaacgactggttcagtggacaccttaacttccagattgagcaccagtgagcgcggggctgcggggaggcggggagacccacagcgggagggaagtggccgctatcccactgggcagaatgcagaatgtgggggccacctctttgtctctctgacaaggtctctgcccaatatagagcaaggctcccagccagccccgctgaggtcaggagaggggctcccctattccatctccctgagggtcatcctgtgcccctcatgctgtgccacttggtcatagtggttaccacctccctccatgtgggcctgggactttgtagttatggagcctgcacacgcacctcatgaccctgtgaggctagcagggcagggctacgtagcttgcctggaacatcggccgagggactgccctgctgccccttgtccttgcttcacctcttgtcactgtttttttttttttttattaaaaaataaaaaatgtagagacagagtctcaccctgtttcctgggctggagtgcagtggtgctttcttggctcactgcagcctcgaacgcctgagctaaagtcatcctcccacctcagcctcctgagtagctgggactgcaggtgcgtgccaccatgcccaactaattttttctttttttttttacttttatttatttatttattttgagacagaatctcactctgttgcccagactggagggcagtggcacaatctcggctcactgcatcctccacctaccaggttcaagcaattctcaggcctcagcctcccacgtagctgggattacaggcgtgtgccaccacgcccagctaatttttgtattttttagtggagacggggtttcaccatgttggccaggctggtctcaaactcctagcctcaagtgatccacctgcgttggcctcccaaagtgctgggattacaggtgtgagccactgcacctggcctaattttttatttttattttttgtagagaagaggtcttgccgtgtcgcccaggctgatctcaaacttctggcctcaagtgatctgcctgcctcggcctcccaaaatgctgggattacaggcgtgagccaccgtgcctcacctcactgcctcttttcctagcattccccagctatttcatttcttttttgaaaaacatgacactttgtctctggccacccaatatcttcccagctccatagagcacaaacgccctcctgctcacggagggctgcaccctcccctccacacacgtggcaccccactgggcacacacgaggagccacactttgagactggtcctggctgtggacagggtctctgagggccccagccagcctctgcccaggtggtgggaggaagcgggagcagcatggccctctgagtcctcacgctctgcccaccctacacactcctcagcctcttccccaccatgccccggcacaacttacacaagatcgccccgctggtgaagtctctatgtgccaagcatggcattgaataccaggagaagccgctactgagggccctgctggacatcatcaggtgaggggtggaggtccacaggcgctgggccctgggatcacccgtggtgcagacagtgggatcacaagaggggctgggccctcctggcacagtcacccaccagggcacctgccttactcccgagcctgtgttaggagctgttgggcttttctccctgggctgcgagaagaccatccctttctgtgtggggttcctggtgggctctgagctgacagccccacaggcccagtggcagtggtaagccctggttagggccaaggggacatacatgccaccttaatgatggcctcctcagcccttgcactccctggggccactcccgtcctggtccctgaccctggtccatccccaactttgcaggtccctgaagaagtctgggaagctgtggctggacgcctaccttcacaaatgaagccacagcccccgggacaccgtggggaaggggtgcaggtggggtgatggccagaggaatgatgggcttttgttctgaggggtgtccgagaggctggtgtatgcactgctcacggaccccatgttggatctttctccctttctcctctcctttttctcttcacatctcccccatagcaccctgccctcatgggacctgccctccctcagccgtcagccatcagccatggccctcccagtgcctcctagccccttcttccaaggagcagagaggtggccaccgggggtggctctgtcctacctccactctctgcccctaaagatgggaggagaccagcggtccatgggtctggcctgtgagtctccccttgcagcctggtcactaggcatcacccccgctttggttcttcagatgctcttggggttcataggggcaggtcctagtcgggcagggcccctgaccctcccggcctggcttcactctccctgacggctgccattggtccaccctttcatagagaggcctgctttgttacaaagctcgggtctccctcctgcagctcggttaagtacccgaggcctctcttaagatgtccagggccccaggcccgcgggcacagccagcccaaaccttgggccctggaagagtcctccaccccatcactagagtgctctgaccctgggctttcacgggccccattccaccgcctccccaacttgagcctgtgaccttgggaccaaagggggagtccctcgtctcttgtgactcagcagaggcagtggccacgttcagggaggggccggctggcctggaggctcagcccaccctccagcttttcctcagggtgtcctgaggtccaagattctggagcaatctgacccttctccaaaggctctgttatcagctgggcagtgccagccaatccctggccatttggccccaggggacgtgggccctgcaggctgcaggagggcactggagctgggaggtctcgtcccagccctccccatctcggggctgctgtgtggacggcgctgcctcaggcactctcctgtctgaacctgcccttactgtgtttaacctgttgctccaggatgcattctgataggagggggcggcagggctgggccttgtgacaatctgcctttcaccacatggccttgcctcggtggccctgactgtcagggagggccagggaggcagagcgggagggagtctcaggaggaggctgccctgaggggctggggagggggtacctcatgaggaccagggtggagctgagaagaggaggaggtgggggctggaggtgctggtagctgaggggacgggcaagtgagaggggagggagggaagtcctgggaggatcctgagctgctgttgcagtctaacccactaatcagttcttagattcaggggaagggcaggcaccaacaactcagaatgggggctttcggggagggcgcctagtccccccagctctaagcagccaggagggacctgcatctaagcatctgggttgccatggcaatggcatgccccccagctactgtatgcccccgacccccgcagaggcagaatgaacccatagggagctgatcgtaatgtttatcatgttacttccccacccctacattttttgaaataaaataaggaattttattctca

SEQ ID NO: 472 - DNA, 1885 bp, Homo sapiens
ggtggaatcatcgccacttccagcaccacgccaagcctaacatcttccacaaggatcccgatgtgaacatgctgcacgtgtttgttctgggcgaatggcagcccatcgaggtacgactaagaggatggtgttgacctaggaagtgtttgtcctgggggaatggcagaccatcgaggtacaactaaggagatggtgttgacctaggaagtgtttggcctgggcgaatggcagccatcgaggtacgactaaggggttggtgttgacctaggaagtgtttggcctgagcagggagcagggaaggaagcctagagagctgacattcagccaggcaggtccacatctcctgctacacagatacctctcctaggtaccctgaattgttctggctggaatgtatgtggaatggcctcacctgtaaatacagacacagctcctcattagaatggtagatgtctccctcctacccttaggccaggaagggcattttctggcttgttttttcccagggtagagggaaatcttgttccagttcagcaggaaggcaagatttcaggggctcaagcttggtcgccaaccgactagctcatgttgagaaaaccttatttggagaatcatcatcctgtacactgggaggagcctcaacgtggcttggtccaatctgcttcaccagtggataagaaattgaaggtcagcgagaggatggaacacgttcagggtcacataatttatttagttttttttctgagacggagtcttgctctgttgcccagagctggagtgcagtggcacaatcttggctcactgcaacctccgcctcctgggttcaagcaattctcctgcctccgcctcccacgtagctgggattacaggcatgtgccaccatgccaactaatttttgtatttttagtagagacagggtttcaccatggccaggctggtctcaaactcctgacctcatgatctgcctgcctcggcttcccaaagtgctggtattacaggcatgagccaacgtgcccagccgagagagtcacgtaatttagtggccagtctagggtgaggccccagacctttggactgctaggccattgccttccatttactataccattttattttcatattagttcattttattactacaaatatagaacacacttggtataaacttctaaacagtacagaaatatccagaattaaaacacgagtctcagcctgggcaatatagcaagaccctgtctctaaaaaaatacatatttttttagttagccaggcatggtagcacgtgcctagtctcagttattggggaggctgaggtgggtggatcccttgacctgagcccaggaggttgaggctacagtgagctatgatcacaccactgcactccagcctgggtaacagagcaaagctatgtctcaaaaaagaaaaaaaaagtgagtctctcaaacctcccctttgccccaaattttatgcccttgagggtaaccactgttaacaagatgctatacagtcttctagatatttttatatgtgtataaacatgcatatatctgtttctttacaaacaaaaattttaggccagctgtggtggctcacacctgtaatcccagcgctttgggaggctgaagtgggagaagtgcttgagcccaggagttcaagaccagcctgggctacatagtgagaccccatctctgcgaaaaatacaaaagattagccaggtgtagtggtgtgcgtctgtggtcccaggtgcaggggaggctgaggtgggggaatcacttgagcctgggagcctcaaggctgcaatgagctatgattgcaccactgcactccagcggggacagaagagggagactctgtctcaaaaataaaaaaataaaaaacaaaaaaa

SEQ ID NO: 473 - DNA, 276 bp, Homo sapiens
ggcattttttgcaaacccttagccaaagcattgatccggcaacagttcaccaggatagtcgtgatgccaaagggtcaggaaagtgtgttttctttcatctgtcgctgggcaactgtcgagggccataactctgagctgaggagacggacacctgtggcctcaaaagaaatatccatgttatgtgtcttgtctcatgggatcctatttgagtgttagaaacaggaaagttcttcttgttcatgttagcagttgtttgttgagccctccctccagcct

SEQ ID NO: 474 - DNA, 102 bp, Homo sapiens
ggcacgatcttggctcactgcaacctccacctcccaggttcaagtgattctcctgcctcagcctcccgagtagatgggattacaggtgcacaccaccacgcc

SEQ ID NO: 475 - DNA, 102 bp, Homo sapiens; identical to SEQ ID NO: 474

SEQ ID NO: 476 - DNA, 156 bp, Homo sapiens
tcacgcctgtaatcccagcactttgggaggccgaggcgggcagatcacgaggtcaggagatcaagaccatcctggctaacacggtgaaaccccgtctctactaaaaatacaaaaaattagctgggcgaggtggcgggtgcctgtagtcccagctac

SEQ ID NO: 477 - DNA, 152 bp, Homo sapiens
acgcctgtaatcccagcactttgggaggccgaggcgggcagatcacgaggtcaggagatcaagaccatcctggctaacacggtgaaaccccgtctctactaaaaatacaaaaaattagctgggcgaggtggcgggtgcctgtagtcccagct

SEQ ID NO: 478 - DNA, 102 bp, Homo sapiens; identical to SEQ ID NO: 474

SEQ ID NO: 479 - DNA, 276 bp, Homo sapiens; identical to SEQ ID NO: 473

SEQ ID NO: 480 - DNA, 3016 bp, Homo sapiens
aggtagagaaagcagggctcagaactgtgtagtaatttcccaaagttcacagctttgtaggctggcagatagtgctaagcactggtctgcatgctgggacagggagaagcagcagttgttgtagtcatagtaacagtgatgatagcagtagctaccaggcagtgagtcctccatgtgtgaggacccttcctatatgtcatatggtttaatccctgtgacagccctgcaaaggccatgatcctcattttacagaacaggaagcagcctctaagagattaattatttgtccagtcacacagcttttcagcaaagagctgatattcaacccaattccatctgatcctaactttctgctctaaagtcaacttgttcgtcaggattagcgatagttccctgatcacaagaacaaagtctgaggcatggtagaagtaatcttttttttcctaatgttgaatatacagctgcctcctgacattcctattgagccagaatacagaatgtttatttaatttttactccttgtgagccttggtggggaggaaagaaacatcagatatttctgcaagcttataaattgttgtagggtactttctcttccaactgctcctgttaagacccacccaaggccgggcacggtggctcacgcctataatcccaggactttgggaggctgaggtgggtggatcacgaggtcaggagatcgagaccattctggctaacacggtgaaatcccgtctctactaaaaatacaaaaaattagccgggcatggtagcgggcacctgtagtcccagctactcgggagcctgaggcaggagaatggcgtgaaccggggaggcggagcttgcagtgagccgagatcgcaccactgcactccaacctgggcgacagaggaagactccgtctcaaaaaaaaaaaaaaaaaaaaagacccacccaagaacccaaacttagctaagaaaatatctgagcacatccagaattaaatatcacaagttgttggaccaacaccttcaccatatctacagatgagtccctgacactcacatggagctgattgactctgatttgactcgtaattctaacagtttctgttttcagcttagtctacggcaacaaaataatagtacaggacccactgcagattggtgtagtaatacaagagatgtgaccagagatgagaagaaagagacccaaaaaatgatcagaagcagaaatgggagcccagaagtgcagctgaccagaagcatttcagtgtcagatcacacgcagcctcctctgtaatgagatcacagcacgtctcatcagttactggttttcattatggtgacactgaacactcatgaaaagttagcattgaaatatgttggtatctccaatttagaaaggtagtgatgatgggtacagtgtttttacggggaaaaaaagccaaaaaatgcattcatgtttgtctactcttaaaacccagctgtccaagaacgattccccaaggccctgtccatcatttctctttctatccttgaagcgcagtgtctgacacataggatgtgctcattgatgccagatgatgaaacttgaatggctggtttcctagggttctggataactctgttttaccgtggatcctggatgtattccaggatgactttaagaaggcgagaaggggtaagacccctgagagctcagtgtttattctgtttttacacatggttagatgagatgatacccaccctccttcaaaaaaaaaaaaaaaaagccattcaatacatggtagttactcttatcattaccatcatctttgtcaacactgaccacggttgctcactggggaagatgtgaaaaagaagttgggatcttccgctcctgggacacatttgaaacccaatagctggaagcaggctgaagctatgtaaccagctctcatccacatgggcaagggtcccaggagttctctgtgggcttacaagctacccacccccttgacaactccagttattaaaggttgagccctgaataaataagtgccgctctccataagagacagccgcctttcagagagttccaagcagctggaagatactcacgcatggagggttctaggcagacagaggccgggccccgtgggctgctccgagcacctggtcggccttcccagcacagggctcattgttttacaggtcacagccattttgaaaaggcagactcactgacctgtttaatgagtgcagtttctgcacgaaagcccatatccctctcccaggcagccccagaactttgctggggaagggggccaaatctcttctcagtgcctgagggatttctggccttaactgctggtggaattagcaggagttatctataaatccctgaggcatccatcagccgactgagcgaggctgcctttttaaagaagttcactgacctcttgttaacttaactccttgttaggaaatatctaatcagctgtgagctaacacgtcagggcccaggggtctgcagaagccgggctcactgtgggctgggtttccagctgtgtgcagtctggtgtctgagctgtggtgttttcctcttttcagctatctttcagatcattcagagcataaggatgggcatgtgagaaagccagggatttgacaccacctccctcccactggaggcgggaggacaacggaagcggtcagccagtttctgcgggaaacaagcaggccacacggaatagaaaaaaacgctcccccacttgttccctgatcacttcatcgtggatgtcagaccaaattgccttctcacaggacatcttggtgcatccgcgttctcaagcggaaaggacattttgcttttctgttggcaggattagtagccacgcgggtcgtccgcagcagtgctgtttttttggtttttcccttggtttcactaatgcgtgcatgtggccctctgaacgatcactggtttactttctatggatacaatctctcctccattgagaattgattttacaaataaatgtcttcgttcaacctta

SEQ ID NO: 481 - DNA, 7361 bp, Homo sapiens
caggtcaaccacataaattggcctctcctggagactgccagaactttctcaaagttgtaacatccagagggagtcaccccacccccaagaccggcaactgagatgtttaaaggaactggctggccctgaaggaaagactgaggccattcatctgctctggagttcatcctcgggatctgagatgcacagcctgaagacatctcatcagccatcagctcccttaaggtgacctgcagcctcctttgtgccctgggggcatttgggattgtgtagaggctctctctcagaagcatctttctgttattttaatgcggatagaaagctttacattctttgctaataacatctgggttttaatagcgcctccttgccctgcctgtctccggcatctctcttttttccctcttctccatctctagagaagccaccagaaaatggcatcttgcttttgactttctttgtgctgattcttttagagaacttagtgatccactttgcaatgtctcgtctcctaacatttcagcttgtttctcagagggcctgtactttgctttctaccagctctttcatcattttcattttctttaatgaaaaataagcaaaactgtatgatttctaggttgtcttcttctcctaaaggatattcttcttccggcctctcttaatctctcttctcagcaactcccttgatctcttttatcatcaatttattgtcaataaaagtggctttaggaagcctcctgttacctggcagggttccagctttctgacactttcctatgggacccacttgttatgtcatccctgtgtccttctggcactccctcttagctggggagggtcagtccccagggtgagagtcggttgggatggcccattatcaggcctttaggagtttatagtcttgtacttccccttcgaagactgagctttagagacatttggatctaaaggcagccatttgatgctgactctttgggtttgcaaagtagtcatttgaggtttttaaaatgtaatttcctctgtgctctttgcaatcgttcacttttcagtaattcaataatatttacagaggacctactttgtgccatacctggtcgctgttatcctggagcttatagtctaatggcaaagaaagatgagttaatcaagtaatcacaccaaaacactttcaattcagccatgaaactgtacaatttcagccatgaaacaatgtaaaggagaggcacatggggctatgaaatcatacaatgcaaaggactggtgtactctcaggtaagtggttctcaaagtgtggtccctggaccggcatctcaacatctcctgtgaacttgttagaaacacagattctccatcccttaactccagggtttggggggaaggtgtccagcatttgtgttttaacctgtccccaagagactgtgatgcatgctcaagtctgagaacctctgctccaggtgatcaaagaaggcttctctgaagacattaaattttggttgatgaaggaaactagggaatagggtggggtagaagtatttcagacagaaagaatggcatgtgtaaaagccctgtggtctcactcctgtaaatcccagcactttgggaggccgaggcgggtggatcgtgagatcaagagattgacaccatcctggccaacatagtgaaaccccgtctctattaaaaatacaaaaaaaattagctgggcatggtggtgcgctcctgtagtcccagctactcaggaggctaaggctggagaatcgcttgaacccggaagacagaggttgcagtaagccgagatcgtgccactgctctctaggctggtgacagagtgagactctgtctcaaaaaaaaaaaaaaaaagccctgtggtgagagcaggagagcagggagcttttgaaaacatgagggagtaccccaagcaaggagaagagtgatacaaggtgagtctgacaggtctggacagggaccatgatgtgcaggtcatgaaggcctcatcagggattgggcaacgggaagcttttgatgtgcagtaaacacgggagtgacaatatattatttgcttttattgaaaggataattctagctacagtatggagaaaggatggaagaagagcaagagtcgagcactgggagggcctcactggggtcttggggaggatgatggtaacttggactagggtggcttctgaggaatggaaagaagggtgcataatcacaagattcccaggtaaaatccacaggtcttggttatcaattggaggtgtcaggaaggactgtggtgttttgagtctacatccaagatggaagataatgatgccagttttagcagtgggacgagatcatgagaaggtcctgttgagtccgaggtacctctgagccacccagctgtagatatcaactagatagtggaaggtgtgctggagctcagagaagtcagggctggagatacacatttgtgcatcatcaacagctaggtggcaattcaaactgtgggctgggaggcattgcctaagaagaaagaacgtaaggagaagaaagccagtgacgttcattgcagaatgtcagcgcttatgtttaatggtcaagtggattgtttcctctaaaacaagtttagaggaaagatccaagagaaggaggaaaattagaacctagaagaccatggtttcacagaggccaagggaagagagtttcaagcaggaagtgcccagcgggggtgagcagggggtaaggcaaaagaaggtggaagaatgcctgttacactaagcgactcaaaagtcatttgtgactttagcaaaagatattcaatggagggaagagagcagaagataaaatgaggtggactgacatgagaatagcaggtaagagagtgcagaaagtgagcatagacagctctttagaaatggttgtgaagaggaagagagggccctgtggatggagatgtggagtcaggcagatagctctggtgtatttgatttttcagtgggagtgctcctagcatgttaaagcctaaagactttgttgaaaggggtgctgaaaaaagagaaatggtatcatctaaggttaccaagggccaggatccttgacacaggtaggaggatgcagaggcttcgtgggtctggtagctcctgctctcccctggacttttctgaacctctgggacctgcccacgccctgatcgcctgccctggaacgcctgctgtccctccctttcttggcatctctcctccccgctgtctcgcctgcccacagttcctctcctgcagcctgttctgctgttttctcagctttgttcacccactgttaagttattaacttgtcagggtctagactccccgcttcctttccctcttttgaactcactgctggctcccttcccatttgccgcctcagaaagtcagcatttggaaggctgaggttactctgcaggtcagtattggcaggtacacagaattacagttaatataattagaatgtgtaagttttcttaaagacaatgatacaactgaaaaagaaataataaacacagtcatctctctgttatcttgtggaggtaaatggtgaacttaaaaaaatagactttattcaaagtagtgtctccaagaaggttcatctgtgaacatgttaaggatcgctggactcttatatgttaattcatggattcaattatgatcaggaatgatcctcagtttttaaagcaaactcaaagaactaggtaagttgttttaatatcagtgtcgctgttctgagacgtgcaaactttatcttagattctttctattatttttatttatttattttttttgagacggagtcttgctctgtcacccaggctggagtgcagtggcgcaatctcggctcactgcaacctccacctcccaggttcaagcgattctcctgcctcagcctcccaagtagctggcactaccacacccagctaatttttgtatttttagtggagacgggatttcaccatgttggccaggatggtctcaatctcttgacctcatgatctgcccaccttggcctcccaaagtgctgagattacaggcatgagccaccgcacctggactgtcttagattctttaaagagatttgtaacagttccttcaaaaagaattgcatggtttcttattattacctcgaacttttgaagttatgaattaacttaatatgggggctacatggactaagacacagatggtttcctatttgttgacttacatcctgctgataagtttttgtctaagggcaagagtaagcgagaagtaatatttttgagcatctacttatgtcatcgtatttattccttgccatcctttgaggtacctattatccacagttttataggtagagaaagcagggctcagaactgtgtagtaatttcccaaagttcacagctttgtaggctggcagatagtgctaagcactggtctgcatgctgggacagggagaagcagcagttgttgtagtcatagtaacagtgatgatagcagtagctaccaggcagtgagtcctccatgtgtgaggacccttcctatatgtcatatggtttaatccctgtgacagccctgcaaaggccatgatcctcattttacagaacaggaagcagcctctaagagattaattatttgtccagtcacacagcttttcagcaaagagctgatattcaacccaattccatctgatcctaactttctgctctaaagtcaacttgttcgtcaggattagcgatagttccctgatcacaagaacaaagtctgaggcatggtagaagtaatcttttttttcctaatgttgaatatacagctgcctcctgacattcctattgagccagaatacagaatgtttatttaatttttactccttgtgagccttggtggggaggaaagaaacatcagatatttctgcaagcttataaattgttgtagggtactttctcttccaactgctcctgttaagacccacccaaggccgggcacggtggctcacgcctataatcccaggactttgggaggctgaggtgggtggatcacgaggtcaggagatcgagaccattctggctaacacggtgaaatcccgtctctactaaaaatacaaaaaattagccgggcatggtagcgggcacctgtagtcccagctactcgggagcctgaggcaggagaatggcgtgaaccggggaggcggagcttgcagtgagccgagatcgcaccactgcactccaacctgggcgacagaggaagactccgtctcaaaaaaaaaaaaaaaaaaaaagacccacccaagaacccaaacttagctaagaaaatatctgagcacatccagaattaaatatcacaagttgttggaccaacaccttcaccatatctacagatgagtccctgacactcacatggagctgattgactctgatttgactcgtaattctaacagtttctgttttcagcttagtctacggcaacaaaataatagtacaggacccactgcagattggtgtagtaatacaagagatgtgaccagagatgagaagaaagagacccaaaaaatgatcagaagcagaaatgggagcccagaagtgcagctgaccagaagcatttcagtgtcagatcacacgcagcctcctctgtaatgagatcacagcacgtctcatcagttactggttttcattatggtgacactgaacactcatgaaaagttagcattgaaatatgttggtatctccaatttagaaaggtagtgatgatgggtacagtgtttttacggggaaaaaaagccaaaaaatgcattcatgtttgtctactcttaaaacccagctgtccaagaacgattccccaaggccctgtccatcatttctctttctatccttgaagcgcagtgtctgacacataggatgtgctcattgatgccagatgatgaaacttgaatggctggtttcctagggttctggataactctgttttaccgtggatcctggatgtattccaggatgactttaagaaggcgagaaggggtaagacccctgagagctcagtgtttattctgtttttacacatggttagatgagatgatacccaccctccttcaaaaaaaaaaaaaaaaagccattcaatacatggtagttactcttatcattaccatcatctttgtcaacactgaccacggttgctcactggggaagatgtgaaaaagaagttgggatcttccgctcctgggacacatttgaaacccaatagctggaagcaggctgaagctatgtaaccagctctcatccacatgggcaagggtcccaggagttctctgtgggcttacaagctacccacccccttgacaactccagttattaaaggttgagccctgaataaataagtgccgctctccataagagacagccgcctttcagagagttccaagcagctggaagatactcacgcatggagggttctaggcagacagaggccgggccccgtgggctgctccgagcacctggtcggccttcccagcacagggctcattgttttacaggtcacagccattttgaaaaggcagactcactgacctgtttaatgagtgcagtttctgcacgaaagcccatatccctctcccaggcagccccagaactttgctggggaagggggccaaatctcttctcagtgcctgagggatttctggccttaactgctggtggaattagcaggagttatctataaatccctgaggcatccatcagccgactgagcgaggctgcctttttaaagaagttcactgacctcttgttaacttaactccttgttaggaaatatctaatcagctgtgagctaacacgtcagggcccaggggtctgcagaagccgggctcactgtgggctgggtttccagctgtgtgcagtctggtgtctgagctgtggtgttttcctcttttcagctatctttcagatcattcagagcataaggatgggcatgtgagaaagccagggatttgacaccacctccctcccactggaggcgggaggacaacggaagcggtcagccagtttctgcgggaaacaagcaggccacacggaatagaaaaaaacgctcccccacttgttccctgatcacttcatcgtggatgtcagaccaaattgccttctcacaggacatcttggtgcatccgcgttctcaagcggaaaggacattttgcttttctgttggcaggattagtagccacgcgggtcgtccgcagcagtgctgtttttttggtttttcccttggtttcactaatgcgtgcatgtggccctctgaacgatcactggtttactttctatggatacaatctctcctccattgagaattgattttacaaataaatgtcttcgttcaacctta

SEQ ID NO: 482 - DNA, 145 bp, Homo sapiens
tttttatttatttattttttttgagacggagtcttgctctgtcacccaggctggagtgcagtggcgcaatctcggctcactgcaacctccacctcccaggttcaagcgattctcctgcctcagcctcccaagtagctggcactac

SEQ ID NO: 483 - DNA, 1326 bp, Homo sapiens
agagctgtgaactaataactagtagcagtagataatgtactcagatgccacatgaaatgcaaaagattctatgctttattccataaagcatggctataggacattgtctactatgtaactaatatttaaatatttatagatttttaaaagatttcttcaaccttcttttctcaccctgtttctagatctgatgcacaaaggaaaataataatacaaaacccataacctattcattgtattgttgcggtagatcgagctacatgctgcacagcaaaagaccttctttgcacttctttcaagcagaattattgctgtatattcactctgaactgagaggtgaggattgaactgtgtagtgcctcagaaaatatcaagagttttaaaacattagttttgagagattgaaatacatagaaacttggaatgtttgaatgtcagcccagacattggcaggcttccatgcagatttcattgtgagtaaaatgtgtactcagtggctgggttcaagcccttcatagtttataagcaaatgtctctgcttcttctagatcattgcaaaaaaaaaaaagaagaagaagaagagaagaaaagaaaaaagaaataggttaagcaaattttgtggtggtgcttatgtgtgcacagacatgcatgaggcctccgcatcttccaaacttggaaagcatattttaacagcacaaatatatctacatgtttgatctacatcagagcctctttttttccctcttccttgcatgcttttaaattatatagtttaaatgttttaactattaaatctgtttggtcttcaagctgtaaacatcacacacagctaataagctttaggaaagaaaaggaaattgacatttagtatagaggttctacaaaaccaatgaaaaccatgcaaatgagctatggaacagagagatttgcatatcctcgttgatttcatgatgatattctcagcatgagcctggcagccttgcctttttacctcttgggatgatgcatgtactggtggtagagccctgcagggtcaatttaacgagtgtaacattgtgattttccatgcggtttctcagaaccactgagcaaaatgcagcaataaccagtgacagaggaaatcgatttttgaagtaaatacttttggaggaggggaagaaggtacattcccttcatatttaatgttgccaaagtaggttgaacaagtttttatattagtaccatttggtatttcaaaataaatagattatccaccatttccatcactctctggataccctcacatgtttaccaccaaaactcctgcgcagagactggtcctctttt

SEQ ID NO: 484 - DNA, 1326 bp, Homo sapiens; identical to SEQ ID NO: 483

SEQ ID NO: 485 - DNA, 492 bp, Homo sapiens
agaaaagcaggctaaggaatctgcttttgcccccatcctgttagaatgataaatagtagcctgatggccaagttgtatatttatttaatacatcgtctgtattgatagtttatgatgtcctggatatgaatacacgaaagcacagttgcatagtggcgaagaaggattttgatatcgtggagatctggatttgaactcaactctggcagttctccctgccttagtttcttgcccgtaaatgggggtgatgaggtagttgtgagaattaaatgagagactatgcaaattgttataatactccctggaaaatagttaaatacccaatagatagcatcactattttgaaatgctttcaaaattatactcgagttttacttctgcaaaatcaaggcagctttcttcagaaaagagagaaatgaacttcacccctaaaatgtacttggagaattttagagggtcttttccaagttgttataaagcacttctgaagtg

SEQ ID NO: 486 - DNA, 166 bp, Homo sapiens
agacctctcatcatcttcgggcctgtgtctccagctacctactctgcacctcctttggggtatcacaatgtcacctgaactcagcacgttcaaagtcaaagttataacaatcaccatcccaccaaacctcatctacccaagaattccccatctcagccattggcat

SEQ ID NO: 487 - DNA, 492 bp, Homo sapiens
agaaaagcaggctaaggaatctgcttttgcccccatcctgttagaatgataaatagtagcctgatggccaagttgtatatttatttaatacatcgtctgtattgatagtttatgatgtcctggatatgaatacacgaaagcacagttgcatagtggcgaagaaggattttgatatcgtggagatctggatttgacactcaactctggcagttctccctgccttagtttcttgcccgtaaatgggggtgatgaggtagttgtgagaattaaatgagagactatgcaaattgttataatactccctggacaatagttaaataccctatagatagcatcactatttgaaatgctttcaaaattatactcgagttttacttctgcaaaatcaaggcagctttcttcagaaaagagagaaatgaacttcacccctaaaatgtacttggagaattttagagggtcttttccaagttgttataaagcacttctgaagtg

SEQ ID NO: 488 - DNA, 166 bp, Homo sapiens; identical to SEQ ID NO: 486

SEQ ID NO: 489 - DNA, 210 bp, Homo sapiens
tactgtttttgcagaaacaggttaagactaacaggagttttacaaaggaactgtcaaattgggatttgactagtgggaattggctgggtgataatcaactttttcttggctgactctgatcagcttcttaggcctgtgtatatacaatacctttgtgaggatatggccgattaggggaaaaactattgccaattttgcctcccctcctct

SEQ ID NO: 490 - DNA, 4109 bp, Homo sapiens
aggtcatgatataatttaagaccaattcccctactctcccaataatcacatagtcttattactttcaatttaacttgagtcactattaagcaagtttaccaaagtgccacaaagttgatttttaacgtttgtaaaggtttgaatgtttatagaagtgcatcatgaaattttgtgtaaatccagatgaactgtcattatagtactataaattagagatagtccataaagttgggttgaaggagattgaaaatatttcctttgattaaaagaaaataattaactaacttgggcttgcttgtgattgaagagggagattagatagtcctctgtccccccaaaaaagaaactagcagagaaagacataaaaagctctttggtgtctgttcatgtgctgtacattttttccgttttaatgtcttgtgtagataattcaaagtttgaactatttctttcttggaataagtaataatttattcaatatggtgtatctctgagttcaatttaaaacaatccaactcagtaatatttatttttaaatacaaatcctaactaaccaattaattaataaaaaggcaagacttacttgctgtagtattggttctcatctgtagagaactgacattggagcaaattttaagtctcccctttgaaaataagccttgttaactgagggcgtaatacatttcccacagatttatccagaaacattttattagagatcttatagtagtatctcagttcctactacagctttctaaaggatgagacttgcatttaacaaaatgacatatataatatttttctatagttttgcaactgaattaaaggaaggtgatgtattataatgtgtagtgaggtataaagggctagttcattctctcccaacaagaacttagaataaaataacacttttttttcatgagacttacctcatttttgttaggctatggcagttttgtccagttcctctgtcccttgagtgaattagatattggtgaattaatctcagaaactgacctataaaataatgactcattatagattgggtgaacttctcattttatttagcttttaaaagtgctaaatcctctcataaaggaaaaattataggaaactatagcggtatccagattctgatgagctttaaaaattataaaatatagcaaatgtcttcatattttagccagaaatattagtacacaaccaatatagaagtcttgtttgtttctgggttctccagcagagactttttgtttgtggcttactctgtatagcctcatgtgccttaaaggtggtgaactctagtttttgtcaatatcaggcttttcaaaactcaaaaacaatccaaatgttgtaatttgttttgcataatgcccatggaattggatatcagtaagcaaagccattaaatcgaaccaatcaatgctaatagagtataaaaacaaaaaccttcaaattttaagtttcatttgtgtaactttattttcggcctagctagatcattgaagagccttgaaagttatctaaagtatggcttaatgtatttttttccctctgaaaaagatcatatgccaggatacttcttcaaaccagatcacttttaatatctagaaagataattttcaaggtataggcaaaagcacttcaaggacagagattatgtagcaagttgattctctaggaattctttgaactcatttgtgtaatagctggaacacactcctcttctttcctttaacaaatgaacttttagcacttctgtcttcaaggaaaaacatttgtttggaattgaagggtactcgcagtccgtttatagtttgggacaattaataggaaaatccccagttgcattcaaataatagtgttgatgttgagggcactgactcattcagcatgtctgaactagaagtaaatttaattctgaaaggactgttagttaggaaataagtatttgtatacatatgtactgtggtaactttggattcattttaagtctgataaagtaagataaactttgtcttaaaaataaaattatgctaagtgaataaaaactgagatattttaagctaggcatctttgttagcatagtatccggaacataactacttataatgcttaggtcttatttctttggaaaataagttacttattccagaagccttagaaggaattctgaaaattcttctaactggccattaagagtaaggaagttgaatggtactgctgaagatctgagttgactcactgaaattttattttcttatttttttaacattaaaattatttctttttggctctccctctagttattttttaaattaaggtaattactgttttaacctagagcatataatggcaaattaaattttaatttgacactcataccgaactcagaaaagcttgtttgatcttctctaaattctgtatgtagtactttttttaattgtcacatttctttgttacatctttgtgtccaacaaaacctgtggaaatctgtgttcatttttgtggtgagggatgggggtgaaaaaggggagacttgctctaattatgcatatacatttgactatgtaaaggtagttgtagactatatgtataaataacaagttaacacttaatattctaaattgttctaaggaacagtggcctgaagccatgactagttttgtggagctgctggctcttttaacagtagctgacctattggatttaaactgagactgaaattgacatttgtggttaggttatctagctgaggcttttaacaatggagcagataatgtctgttcctgtagtggatccatttaatttcctatttgagtactctcacttaacaagtattatctattctgaacctttgtgttgggaatttaaggactattgtcaaaggctattaatggtaaacaagtatatgcaaaacaattcacatatgggtaaaaatttcaaattgtgggtttttgtttttgctttttagtttcaaagattagttatgtagcagcaatatcataaccaaagcaagtaggaagttgactggtttggagaatcttcaagtagttttaaatactgtaatgtatcagattgttaaccaggatttttttttcctgtattactgctaaatatattactatattaatgcacttttgtatatataactgtcttctgtacattctgtacttactacagtgtatataaagcctgttttccctgaagctgtgagggaataacaatagttgtatcataagtcgtttctattttgagttccttcttgtacttgaaagtagttcagtagtgaaatctaaatgagtgtgtatggttgtaattaaaactggcaatgtggcagagctgtcttttgaaactgaataccagaatgaaaagtgttgttttggttaagaactcttataatatattatttcttttgatgtaccctgagttgttacacagcccactcactgctgcttactactttatacttctgagtcagctcctttcatgctctatcccagaatatttaccaacagaggagaactgctcccttttctgtttctcacagtttggttatggctttataaacttttatttggtgaaagccccagatacccaaatgtcattggcaaaacttatttttttttctggacagatcagatttctagagagagcagatttctagagagattagcattcatagtaagtgaaaattgtctaatttttttaatccatgctattactgggcagtaggtctaattttttttgacaaaaaatagatctattttccttatatattgatttagaatcttaagttagaattttatagaagaaatgtctgagcagttctatgtatggaggagcaattcagcttttcagcagcaactttatcttttgccactagagggagatctgtggttgctttctcctttggagaatagctgctttgcttttatttttaatttctaaggttggaatagaacttattctcaaaattcctttagtgttattaaatattttcatttattagtcaaaggtaagttaattaagcttgtttaatgatgccaatcttatgcttttctgtaatcttcaatttttaataaatgtgagttagatactaagtgaaa

SEQ ID NO: 491 - DNA, 2000 bp, Homo sapiens
gcagatgttgatgttttgatgtaataagggtgaatttatcaacgttctttgtgagcattaaaatactccatccttatgggtttacatgcatcttgaccaaaattttggttagggctgtgctgatgtaccattaataatttaagccagtggttcttggcaggtgatcccaagacctgcagcttcagcatcacttgagaagttgttaggaatgcatactagtgggccccgcccccagacatagtgaatcagaaaccaacagggaggcgcctagcattgtttttttaacaagtgctgggttattctgatgcacagtctagtttaagaaccactactttgggtaaacgttttgactgtttaaagtttatggcggtgaagtgggcgtcttcaaagactagtacttacacagtttagaagatttcaaggtactgctgacagtagtttattatgtcagtatacatacatgtgtagagatcataatttagttcccttcttaatgttacaatttcttagtttacttttcctaaagggccatagcataattcttgattcctggtggaaatcttttctgaggtgtgggggtgggcaaggtgtggattgctgtttacgatagtgccttcattagttttagttctgtctgttttcattcattattgactcaaaggtattagaacaggcccttatctttttcctattagatttatttttgttttttactttatgtaagttcagaatccttttttaagtgatgactactgatgaaataatgttactagtagctgaattttagacttgatgctatgttgattaatatttaaatggtgaaagtaattaggcaaaataagcaattctgcttttctgttgctttcagaatttttaggctgtaaaattgtctcaggcaggaagtcagtctatatctctctcaagttcttattgtaggtcatttttttttcagcacagctctaatttttaaatatttggtataacagcttctggcatgtgacctagttaatgttgaaaattaactgatgaaaacccttgtagatctgctaaacttctctataaattgctagaaatatacagagcaatgagatatagaaaacaccttagcttgttggttattaatagagctctaattttaactgtgaaatcatggagtttctttaaatgttttcctagagtgtttgttatcatgaacattagaaatagcattattccttttcttctaccacatgtcttgaacattcacatgggttaaagaagatggaaactgatactactgacaatcaagctgctttctgactttcataattttctttatattgtggatagcattttgaaggtgaccgtgattctgtaggaagagctgtaatcaatatttttcaaactctaagagtacagaggttagtaagatttcttttttttttactttttgttacgtcaagtagcttattaagaaaaagattcatgacttaaattcttaattctcagttgatacaaaggcttataatcatgtgttttaaaattttgatttcattttcgttccttgaaggttaaagaatggaaactggggataaaaattaatacactgcagctttgccaaggtctgtgatatggttgtaaccttttaaagactactaaagtcataatttgaaatttttactaaaataaaacatatgtgtctatggttttcaattggagtagtctttcttactttcccccttcccctctttggttctcctaaccagcttagaggacccaaagagagcttagggatagacaccagaatactctgtggaggtggaacaacttaacctcactgttttcccttccaagtataggaagagcaaatagagcatagtaactgtatctaaattctctacctgctcttagcaaaagcaaaatcccacagaatgattgcctgctgtctttacctattcttcaaggaaaacaggccacttttggagaccatagagcaccatttatctgtcaaatacttggaa

SEQ ID NO: 492 - DNA, 331 bp, Homo sapiens
taccatgtggctacaggctatttactgtattgaaaagcatgagatgtagaacatttccatcatcacagaaagttctgttggacagtgctgctctagagatttgctggtttatgtagtgatcattatcatcattttatcagtgaacagtaattagtggctaaaaaactgctgcccacagttaactgttgtaggtgattggtgtgagagggagattaaactttttcttttttttgagacagggcctcgctctgtcactcaggctggtatgcagtggtgtgatcataacccacaacagctttaacctcccaggctcaagcggtcctcccacctc

SEQ ID NO: 493 - DNA, 2271 bp, Homo sapiens
gaggagagggggttattttagctgagtctactgtgttgctgtgatcttttcaaagtcaacatttcccagtgtttcctcctgtttcttttaattctcacatcaggacgcttggtctgacttcccaggccgatgctgcatattttgacgtctcctatgagttttttactggctctttttttgtgctttcccagattgagtgtaaacatgggtttgtgctagaaaccatgagggttcctgttcatatttccaggccatatgaaagaaggagggaaatgtttagactcactggttttgctttgtggggtggtctcatctgggaggggctgctgtgcacacggggagagcttgctgggcagtgactgcctccggctcatccacagccctggcgtctgtgaagcctgtgtgctttcccctcaggaaagctgtggtggccttgttggggtctctcagaatcccaccttccctagactctacccacttctttgatggctgtgacacatgctgtctgttggagagatggacgcccagttatggtccttccatgatttcagtagtggcttagggcaggaggaaggtggactgagaggtgggagttagtcgtctgtcccaaactcaagggagcactgcgattataaatggtgtttctcgacagagggccttgtccccagataaagaatacttagggtcacctggacaggagcagtgtgtgcacccacgggtgtgtctgtctctgtgtgagtgcatgcgtgtatactgtgcatgtatgtaatgtgtgcatgtgtgtatgggcatgtgtacctgtctacatgtgtgcacgtgcataggcctgtgcacatgtgcatgcatgtgtatgggcatgtgtacatgtgagtgcatgcatgtgcaggaggatgtgtgtgcacgtgtatggatatgtgtgcttgtgtgtgtatgcacagggcattgtacgtgttcatacctatgtgtgtgcatgtgtgtacatgtgtaggagtgtgcacatgtgcatgggcatgtgggcatgtgaggacgtgcatgtgcagaagtgtgtgcacgtgtatggatatgtgtgcttgtgtgtgcatgtacagggtgttgtatgtgttcgtttgtgtgtgtaaatgtggagtgcacatgtgcatgtgtgtgcaccgtgtgatgggtgtatgttcgtgtggagcagacacccatgctggcctgccggggctgcctgcagatggtgtgggagacgctggggccacccaccacggctgggctgagctgctcaagggaggctgactgaggggctgctctctgcccatcagtgtgggtgggtcagtttgtctgtggcttctggaattcctgtgaggaaccgagagggactgagagccagccctggctggaaggggtctctccctgagcagcctcttggggcagcactagggtgggcagaacttgggagctccctggtggtctgaggtgtggccgggaaggcagggctgagaccagccgggtgcccctgcccacccactcctggcgtggtgtcggctctgcacagagtgcacacgcacctgtgtcctcctttccctgacatgaaagatgcatttgcccaggttcaaaaagggcttgtggaagtcttgaagcagctgggcaaggtggtgcctggaagcctgagatcctgccggctggaccaaatgcgttgtccacaactacagccgctgatgagtgtctggctgctcacctgtcccctaggggccccgctgagcccccaggctgcatcccctggcccgccacggagaggactccaccccaccctcatttcccaggggaggagccgggcctctgggacttgcggaggggcctgcaagtgaggaccgtggctaccagggacctggcggctgcagatgctttgtgggaggcctgtgtgcagcccttcgtcctgcccggagctgggacctactaagcagtggagttcagcagggctgggtggagctgcatctccctcctggggtgcccacccaccccctctgtgctctcacgctcacaaggggcctggaggtcccagttgctagggggccctctattcctgggtcccagatgatggaaacgcaatgttaaaaatgttcaccagaccaacctgtactggctgcaattctcaataaagcagttgagggacacacccagaacagtgggcgcttctgccagtgccgccgtgccacttagcctctggccatgaccccacaggaacaggagcggggctatagggagcccctagggttatacaggaccctccgc

SEQ ID NO: 494 - DNA, 321 bp, Homo sapiens
gagtaaactcagaaccatttcaacacttcttttgggattttgtggcctaactcagacgagtgtctcccagcacgtccttgggaaggcaggactgctttcagactgcagctgaggggttggagctgacttacagggctatttcgggatctgcagtggaaccaaggttggtgggcctgccttcaggggggatggactggggtatcttccaggagatccctgggcagatggttcctgtgtcaggagagccaaacaaggctgccattgagtccatagggggatgaggccatttctggatctgcaaaggaccccatttggcgagct

SEQ ID NO: 495 - DNA, 5918 bp, Homo sapiens
ttctctctccccccgaggcctcgccctgctgtaggtttccagccttttattcatacaaggactcaaaagaacacacgtcacccgctgacactgagcggtggggggaccttgtggaggaaggacacagcaggcttggccactgccctgaccagtgaccactcagggctgccccttccagagatgagcgtagggtggggtctgagcgccacccctaggccgtctgtgtgcagcgggagtgctgctgtcctggcgcccggcatcactgtgccagagtccccagcccaccctggcactggcagggttattatggggtggacttgcctgtgttgggggctcctgatcccaaaacatctaaagtcaggttccagagaacaagccatggggacctgaccagcaaccggggacctccgtccactgtgcgggacggtgatgaaaagcaaagcagcactaagcggcctcctcagggtcagtcggttcaggacagctgcccccagaccctccaagtcctcctccccctgcaggaccccttcccaacaccacaccacccctccccagggccgcctggcagctggggcacaggagggaaggagggcccgtccaggcctggggcagggccctgatggcctcagtgagtgacaggaggtcaccagggtccaaggtgggccctgcggccctccgaagccatctgggaggagcgaacagctctccatgaacaaggacaggaagtgtcagtaaatggatgcatgtttggaaaagcccttaactatccaggtccccgtgccctgcagctggctgggtcgggaagggacctaggcattcccgtctgcagtgcggggtctcaccagccaccagcatccctgtgagcaggtgacagctgagggtcactctgagccctgacctgtgtcaccgtgaacagggaggccctggttcctgatctgggtgaggatgggagcaggcgggtcctggctgctcctcagccctcggggtcctccaacagccctggaccccagcaaggcctgccctgtgagccctgtgtgcgaggggcagcccacattggcagagcccacgctgcctccctgggcctttgggcccagcttcccctcctccagcagaagcgcaggtgggtcagtggcccctcatctgcgcatggagggcccctcactgcaggtctgtgggaggacagtcctcagactcctcagcagtggtgctgtctcaggcgtcaccctgcagacgctggggcccctcaagggcgcagggaggtggggccgggctctgcagcctgcgctgaggggagggcatcatgcatcatctcagaggctctgccagaccctggatggcggacacccagacagcccgtgcggggcttctctggaggctggggggtgggccagggctggctggtgggctctgctgggagtcccagtgggaggaggcggggaggaaggcacaggctcgctgtgggctccagcgggttgctttgaggcctcctctgtaggcctcgaggggctgcttctgcggcggtgcagggagctggggggagggctaggcagccggaggtgcccctgaggtccctgaaatacatggcttttgggcacactggctcccagctgacctgaggacctcatacaaaattaaaaggcagaaaggcaggcgaggccaggcctggggctgggacctctgcgcctgcccctgctcagagccgccggccctccctgtcccaccccaggcctctccaggctgaggtgaattaaatatcgtctgtgttgtatttttggcaaagtcagtccttggcctctgtccctggggccttggggcagttaccgccaccggggcctggctactgtaagggccaggaagaggaggaggggcaggaggaaggtcgggggctgggggcagctggcagccgaggtcttctgtccttcctgctctgacaggcctgggagggcatgggtcaagggcgtccgggagctggagctcttcctgctgaccttccggctgcagaggtcatccagacagccatcaccgctgcccgagccgctgccgtcgtcacctgggaaggagaggaggctccggcaggcaggtccccacaggagaccccagtgcagcaccaccctgtaagggcccgtgccaggtgaccccaacatcctttcggtgtggaatcccaggaccagcagcacctgatccccgctgacccctgaggctgggagactctcactccctggggctgcctcccttggtccctggagccaaagccaacagacatcccggccaggcctccagggcgccgcagaggtgcagggctcggtgatcgtgcctgggcagcacagcgtcctcagactcactgtggtgatgccggagcagagggcccctcgggtgggggaacccggagggcagtcacacccctgtggcacccccaccaaccctggccccttggccgcccggccaggccctgccctcactggcgtcctggaagtccacgtcgttgccgttgtaggcgctgcgcagccggttggtcatgatcttcagctgcatgatctgctgccggatggtcatgtccggcttggtgatgtccacctccacctcggggttgttgatctggttggccaggccgtcacccatgacctcggggaggtacctgggggaaaggcaggcagagcccaggtcactgctccagcccctgcaaagggccatcacctgagcaggacactctcccacgctctgagcctgagatgcccagcagcttccagggaccgagcagagcccacacaggccgcagagaagtggggctcaagccctccagcaagggacgtggccccgtgcagacagcacctggcccaggcacagcccaatggaggcggcatgggagggagggctgtgccagccaggtgggcacctaccggcctctggccatcccgttccagcagcggtcatcactggcagtgctcagggccatcttctcactgcacagtgtccctgggaggctgatccagaagtcctggacgtcgcggagctgggccttggcttcggagacctgtggggcagcagtcaggccactgggctgccagggcccgcccgcctctgcctgtctgcctccctcatgcctggtccagtggacacgcaggggccactcaccagcttctccagcgtgcctgaaggtggcctctcccgcggggccagcttgccccggcgccgcttctcctcaggcccggggccctgggggttgaccttggggttcccgcagccctggatgacctggagagacactgcagggtccttggggggtagtggggcccctcaagcccaatggggccacatccaggacccccaccccgctgtgctcgtcacgtcctcctgcccgcaccttggccgtgagcgtgtccctgttgtcctggagggcgttgatggcctccgccagccacgtgtgcacgctgccgatgacactctccacacccgatgtaccccagaacttgtcggtgatgagcaccatggagtctaggacaggcgttaacacgcggacacacaggcgttaacgcgcgcacacaggcgttgacacgcacacgcaggcgtcaccacgtgtgcatgttaatgcagtcttgacagcacgggtcagcatgggagatcccacgtgtgcactcaggttggcccgtgtgacatgtgcaggccacgtgcactcagcttggcccacacccacgtgtgcacctgtgccacgggcacaggtgaacacgcacatacacagaggccattctgcatgcttgctggcctgccgtgtctcgtatgtccacgctggctcatgcaggtgttgacatgtacatacgctggctcaccttggtccagcttgtgtgcacatgagcccgtgtgagctggtgtgtatgcatgctggcttacctcatgccccccccatgtacaccttagttcatgtgtgtgttgcgtgcacggtgagcacatgtacaagtaaagctcatgcattttgtcagctcccatcacgttagcacacacctgttggccccgtgtcagcacatgctagcacgtgttggcacagatgcatgctgtcccccctcatgtaagcatgtgtacatgttagtggatctggataagcatgtacatattaccacacacgtgttggcattgatgcgggtcagcccagctcatgtcatcacatgcgcccaggagcacacgctgtactggtgggcactggcccactgtgtgtcagcaagtgagcacgccagttcgcatgtgtcagcctgtcatgtgacggtgcatgtatgtgttagcttaaacaagtgccggtcctcgatgagtcacacgtgttggcatgtatgcacaccgaggtgcttgctaagtggggaaggacaagaaactatgaccccacagggctccctccctggcagctgccccaagtcacacatcactcaggacattcaaaaggcaccctggcccctcaaccctgcagcaccacccagatctggcccgggtcagggcatccctgatcaggtccctgggtccaagctctaagctagggaccacccgccccccaggacccccagtcgtgcactccccaagacagttccaggccgctctcgcgggtgggggctcacccaggaggttcctccactcggcgtccaggtcggcctggttggcaaggcagcccttgagcacatttcggcaatagtcagggcagggcctggcgccggggactcccaggcagtgagcacagtagaccagcttcatgacagctctcgagcactccgggcccagggggacctggggagcaagggaccctaagccaggccccgaggccctgggggtgcctggccccggccagcccctaacgaagccccagggtagggggctctggagggaagtcaggggaggcctctgctctgccccagctcgtggtggtcgctgcctgactcgcagggcctgccagcccagacggccctcattttaatgatctcgagggtcacagggaggcaagaatatcctcacccgcatgccgctgaggaaaccaaggcatgacttgcccaggagcctggaggtgggggcagttcccacccagggcatgtgggtctgaggctgacgccctccctatgtcccagcttagctgggtctgacacgtgccccgcaagggaccaaggcatccccctggcctgcgaggctctggggccccaccctgcccggcccccacgcatgttgttctcttctgtctcctctgcactttcactccacagcctggctcagcgtccagccccagcccctggcccttcccatcctggcccatgatggttctgggcagggatgggccagcccagagccgcctgcccagagcaaggctcacatctgtgggtacgctgttagcaggccatgggcagcagccaatgcaggagggactgaggctgtggggctgaggtcagaggctggcccagaggcccaggggcacagggttaaagtagggggaagaggaagtcccttgggcagagcatgggggtctggaggggtttctgagagccctgggtggctgtgcgcacctgagccactttccggaccacgtcgctggccacgcccaggccctgcacaaaggagcgagcagccacgaaggcacgggtggcccgcaggcgcagctctctcggggcctccccgaagggccgcagcgcctcggcctgcttgcccaggcagtccaggtagtcatcaggcagcagcagctgggggtgcagctgcttgaagaggcgctcgagcaggcgggcccagaactcggccagcgtctcctccaggtgcaggttggcaccgcggtagtacaggcgcagctctgagtacaggtcccggaaggccctcgcgttctgcgtgtacagctctccgaaggcgccggggaaggtggcctgcagcgtccgctccgagtcgttcagcaggtgctggaagtggtc

SEQ ID NO: 496 - DNA, 475 bp, Homo sapiens
tgcattataatgggggcaaagccccacgcctttgccaaatgtacagaccttggggactcatttgtgggcctagagatggggcaggctgctggcatagttaagagcccagctttggtttaacctgactgactcaaatctctgccacttattattattttttttgtgtgtgtttttgagacagggcctcactcttatcacccaggctggtgtacagtggcatgatcatggctcactgaggcctcaaactcctgggctcaagcgatcctcccacctcagcctcccaagtaactaggactacaagcatacaacaccatgcctggcaaatttttttattccttaagtagagactggggtctcactctgttgtcctggctggtcttgaactcttgggctcaagcagtcctcccgtctcagcctcccaaagtgctgagattgccggtgtgagccactgtgtctggacttttttttcttcttt

SEQ ID NO: 497 - DNA, 186 bp, Homo sapiens
gagatggagtctcgctttgtctcccaggctggagtgcggtggcacaatctcagctcactgcaacctccacctcctgggttcaagtgattctcctgcctcaccctcctgagtagctgggattacaggcacctgccaccatgcctggctaatttttgtatttttagtagagatggggtttcaccatgt

SEQ ID NO: 498 - DNA, 172 bp, Homo sapiens
ttgagatagtgtttcgctcttgttgcccaggctggagtacaatggtgcgatctcggctcaccgcaacctccacctcccgggttcaagcgattctcctgcctcagcctcccgagtagctgggattacaggcatgtgccaccatgcctggctaattttgtatttttagtagaga

SEQ ID NO: 499 - DNA, 788 bp, Homo sapiens
aaaatacaaaaaattagctgggtgtggtggcgcaaacctgtagtcgtagctacttgggaggctgaggcaggggaatcacttgaaccccggaggcggaggttgtagtgggccgagattgtgccactgcgctccagcgtgggcgacagagtgagactccatctcaaaaaaaaaaaaaaaaaatctatgctagtagattacaacttcacactagaggagttctggacaaagcttttaattagtcaaactaaattaaggctcattaaaaggaaaggaactactgggaaattatgcaattcaataatttagactctgttaccaggatctttcataaaaatttaatttccataatcataacctaaatgagttcttaaagaattctataagcaatagctgattaatgggccctggaagatgaagattataactgtttatttacctaattaaaaggaaaggcagtgccaaatatgagaggataaacaatattagttaacatttctgttatttatgatgccaattagtagtaagataattccacagctgtcaactttgtttggggctggcaacttctctgcttaaacaggctaaaagtttagtattctgggagaagtggctggaagaaggggtaatatggtgaaagcaaattccctttcccaggagtcaagagaatttatgtgaggtggctcccgcctgtaatctcagcactttgggaggccaaggcaggcaatcacctgagggcgggagaccagcctgactaacatggagaaaccccatctctactaaaaatacaa

SEQ ID NO: 500 - DNA, 8319 bp, Homo sapiens
tctcctgatgatgatgcacagccttcagcgggggacatttaagacgcagaacaccaggtccaggctgcagctgcgggactcagaggcgaagcttgaggggctcaggaaggacgaagaaccacccttgagagaagaggcagcagcagcggcggcagcagcagcggcagcgaccccaccactgccacatttgccaggaaacaatgctgctagcgacattcaagctgtgcgctgggagctcctacagacacatgcgcaacatgaagggtgagcgctgcgggaaggaggcgatgaggggttggccagctctcagcggatgaggctcaggccacccaattctgatcctagttgtgcctcttactgggtgaacctgggcaagtttcttcccttcttgaatctcagttttcccctcggaagaagtgggctggttactaagatatatcccttccagattctataatttctggtctcccctccaggactccaatctttttttctccttttctttcatttttattctttttctttcttccttccctccttcctttcctttctttcttcctttcttccttccccttttccttcattcgttctttttttcttccgccttttcttttttttttgtttgaataaaggtctctgtcacagaggctggagtacagtagaacaatcatagctcactgcagcctcaaacccatgggctcaagccatcctcccacctcagcctcttgagtacctgggactacaggcgtgcaccaccacaaccagctagttttatttatttatttttatttttattttttttagagacaatgtcttgctatattggtcacgctggtcttgaccccctgggctcaagggattctcccaccttggcctcccaaagtgctgggattacaggtgtgagccgccacacctggcttactttattttgagatggagtctcactctgttgcccagcctggagcgcagtggcacgatctcggctcactgcaacctccgcctcctgggtagctgggattacaggtgcatgccaccacgcctggctagtttttgtatttttagtagagacagggtttcgccacgtcgaccagactggtcttgaactcctgacctcaggtgatctgcctcccaaactgctgggattataggcatgagccatggcgctcagcctattttatttttgaggcagtctcgctctgttgcctaggctggagtgcactggcgctatcttggctcactgcagcctctgcctcctgggttcaagcaattctcctgcctcagcctcctgagtggctgggaccacaggcgtgcaccaccatgcctggccatctttcttgaactattcctgactttgccttccttcagagctggacaagtcttgtagcaggggtacacaggaaagtcttgcccacagtggcagagtaaatattagacttgactcccacaggcaaaaaaagacggagaagagagataggggagtaagacaggagggcaaggtaaagagataagacggaagactggttatcattgaatagccaggaaggggcagaaaccagctacaagaggccacttttgtagagctgattcgcatccaaggtcatttgaatcaatcccctgctgccactgaagggtacacaagtcaatctaggcacgatctttccaattacactggattgaattagctacctttacagcgagaagccatgcttagatctgcagctggcagtggtgttgtcgtcctcactagatggacagggcttccctggcccagaatccaggggcacacagagtagcttatgcatgcaagcacacagactcacagaagcacagattcatgcaatcagattctggcaagcacacagacctcatgcaagcacagactcgtgcagacacacagactcatgcaagcacacaggcctcaggagttgtattctccttatgaagtaggatttttctggttgcttgaacacagctttttccccttttagagacagaaactccagcaggctctggtatagcccatctccaggcagggccaggcctgaccaccccagatggaaggcagatttctggaccctggagcactgccatgggagttgagggcctggctctagttcaggtccctgctagaatcctgtgtgctcctgagcaagtcacttccctctccaaaccaacttactcatttgagacaagatgagggggtggagtggtccatctctaaggggctttccagctcctagacaagggttattcccttctgcagggctgaggcaacaggctgtgatggccatcagccaggagctgaaccggagggccctggggggccccacccctagcacgtggattaaccaggttcggcggcggagctctctactcggtaagtgctgaggcttctgggctcctggtgctgctggcaggaggttccctggagggtgatgtggtgcatgtggctttggctcccctcctgccattccttcattttgagaggacgtccccagcctagagttcctcaaggccagatccctctctggtcacctggggcggctgtgattaactcgaccagcaggctggcccctatggctttagtccgggctcttcagagcaatgagcagacccagagctccagggatgagagctggtggaggctgggagaagaaggaagctctgtctctcctcggctgtgtatccaggttctcggctggaagagactctctacagtgaccaggagctggcctatctccagcagggggaggaggccatgcagaaggccttgggcatccttagcaaccaagagggctggaagaaggagagtcagcaggtaagtgtcggggagaagcctgtggttcctccatgctccactgccatcctcaaggccagctggggttactatttttcccagaattcctgtctcatgcagcagtcactgggtagcaagtggttttatcttgagaactctcctttctcgagaatatatcctcagataatgctcttcccccataaaagacaccctggagagtcctgtttgagaaacactattcctgtgtccttagttacagaataggattgcattgtgtgcccacttggcagacatcatgcaaggggaactccaagtgcctcattgccctgggtcagatatcccaacgatgccaaagtgcactgtctgtgctgtcagcccacctgtggctgggcttgcaggggtgatgtgggctcaccctacaacaggcctggactagaacacagagtggtccatggccttctggggttctctgcgcttgagcactgacccatcacaggggacagtaaccaggttcacggtaaaggctggtggctctgttatggagattttggtggctttaccttcagcaaaagctgacatgctgcccactatacaaagttcaggtagaacccttccttccctaagttctcagagtaatggagttaacagactactagtttgggagccaactgggacttaggtcggcactgctcttagttaagggtccctgggccaatcactgaccttctctggccccacattcttctggtgtggaatgaggtattgaactaaaacaaatcttgaagatcccattcaacattctatgtatctaattaagctggtgtaaaccacttttcccactcccaggtttctctcttgggatctttgagcttctgaagtcaagtaagagtcttttcagttggacctacccataccaccatcattcaccaccaagacaaagggtccagtggggctgggtgcagtggcttacgcctggaggccgagactggagaattgcttgagcctaggagtttgagaccagcctgggcaacacagggagatcacatctctacaaaaaatttaaaaattagctaggtgtaatgctgcttgcctgtagtctcagctacttgggaggccgaggcaggagaatttcttgagcctaggaggttgaggctgcaatgacccgtgattgtgccactgcactccagcctggacaacagagtgagacggtctcaaaaaaaaaaaacaagaaaaaaatcttaaaaagggtccagtggcagcaggtaacttcctccagttgtcagcagatgcacaaggccatggcaacaatgattaccgactctatcttaggacagttccaggcttcctcgtgctcaacttggagttcctttgctgttcccctccccatcttgccttgtattgcctatgggacctagactaagaatatatatatatatatataaaatttttttttttgagacaactctgtcgcccaggctggagtgcagtggtgcaatctccactcactgcaacctctgccgtgcaggttcaagcaattctcctgcctcagcttcccaagtagctgggattacaggcgcctgccaccatgtctggctaattttgtagttttagtagagacggggtttcaccatcttggccaggctggtctcgaactcctgaccttgtgatccacccaccttggcctcccaaagtgctgggattataggcgtgaaccaccatgcccggccaagaatatttttgtctaaccaccttctgggggctcctttctctgacaggacaatggggacaaagtgatgagtaaagtggtcccagatgtgggcaaggtgttccggctggaggtcgtggtggaccagcccatggagaggctctatgaagagctcgtggagcgcatggaagcaatgggggagtggaaccccaatgtcaaggagatcaaggtgagcaaagtccaggtgcgggtggcaggggcccaggagagcccagtgtgaatgctgtatcaaagagaggacccctagctgtggggggtgcttagcccaacacaggctgagtcgtgattctggttccccatggcctggtaggtcctgcagaagatcggaaaagatacattcattactcacgagctggctgccgaggcagcaggaaacctggtggggccccgtgactttgtgagcgtgcgctgtgccaagcgccgaggctccacctgtgtgctggctggcatggccacagacttcgggaacatgcctgagcagaagggtgtcatcaggtaatacgggcagcaggctccaaacccccctcttctaacacaggcctgcaggtgtgcacccaagcatgtggactgcatccccagctccaagaaaccaacccttggtgcacccatggcttccttctacaaaagaagatacttatttaccaaaggagggacaaagacaagataggccctacttggacagccagacagcttgtcatgaccctcccagaaagtttaagaaccttaataattttctgaagcatggggcagggctgaggttcacctggtacgctcaggaacagctgtaatgtagactaaaatattgaaataatccataccactcagtacaccacagcctcctgaatttcccaaggccccagcccagccaccagcctgaatcctttccctgacatcccagtaatccagcaactaaagggcacaagaggccgcaggggctgctccagctacaagcagcctttattctgatgagctggtaactgtgccaactgccaaataattaccctttgcaaagggcacttccctgatgagactcagaaaagacaaggtaccgtagaaacgtgttatctatggtactggtgtaagcagccagtgcaagagagaactcgcaactgtcctcctgacttgacttctccatttgccagggcggagcacggtcccacttgcatggtgcttcacccgttggctggaagtccctctaagaccaaacttacgtggctactcagcatcgacctcaaggtgaagggcatgggagggggacctggaaggcaggtggtagtgagaaaaacaggctcttcccattccccccatgctgcagaaagaatcctcttctattctgatagaatcacaggctgtaagacagggaagggtctggagtgatggcctaactgctactctaccatctccaaagcctgtgatggccccctcttcttttttttttttttttttcgagactcagtttcattctgtcactcaggctggagtacaatgacatggtctcagctcaccgtaacctccgcctcccggattcaagtgattcttccgcctcagcctcctgagtagctggaactacaggcgtgtgccaccacacatggctaatttttgtatttttagtagagacggggtttcactatggtggccaggctggtctcaaactcctgacctcgtgatctgcctgcctccaaaagtgctgggattacaggcgtgagccactgcgcctggccctcttctgtctcacagcaaagttcaactcttatatgtagttatcattttagaaagaaggaaacttaggtccagagatctgaagggtgaaaaaggcaacataactggttcagggtcacacagctgggaacaccaggctgaaacatcttgttggccagtcttgtgcttctgaaagtcatgacagcagaggagcaatgcagtcctcccgcccttgactgggcaactccaaggctgcacctattaacagagctcgaagaccaagcccctggcagcctgtttgtgatagggtgcagtgtcaagagtgggccaaaacccacaagatggccaaattctcctacctcctactgcaggggtggctgcccaagagcatcatcaaccaggtcctgtcccagacccaggtggattttgccaaccacctgcgcaagcgcctggagtcccaccctgcctctgaagccaggtgttgaagaccagcctgctgttcccaactgtgcccagctgcactggtacacacgctcatcaggagaatccctactggaagcctgcaagtctaagatctccatctggtgacagtgggatgggtggggttcgtgtttagagtatgacactaggattcagattggtgaaagtttttagtaccaagaaaacagggatgaggctcttggattaaaaggtaacttcattcactgattagctatgacatgagggttcaggcccctaaaataattgtaaaactttttttctgggcccttatgtacccacctaaaaccatctttaaaatgctagtggctgatatgggtgtgggggatgctaaccacagggcctgagaagtcttgctttatgggctcaagaatgccatgcgctggcagtacatgtgcacaaagcagaatctcagagggtctcctgcagccctctgctcctcccggccgctgcacagcaacaccacagaacaagcagcaccccacagtgggtgccttccagaaatatagtccaagctttctctgtggaaaaagacaaaactcattagtagacatgtttccctattgctttcataggcaccagtcagaataaagaatcataattcacacaaacatcagtctttgttttaatattgtactgttaaaaaaatctatgcagctgggtgcagtggctcacgcctgtaatcccagcattttgggaggctgaggtaggcggatcacaaggtcaggagatcgagaccatcctggccaacatggtgaaaccccgtctctactaaaatacaaaaaattagctgggtgtggtggcgcaaacctgtagtcgtagctacttgggaggctgaggcaggggaatcacttgaaccccggaggcggaggttgtagtgggccgagattgtgccactgcgctccagcgtgggcgacagagtgagactccatctcaaaaaaaaaaaaaaaaaatctatgctagtagattacaacttcacactagaggagttctggacaaagcttttaattagtcaaactaaattaaggctcattaaaaggaaaggaactactgggaaattatgcaattcaataatttagactctgttaccaggatctttcataaaaatttaatttccataatcataacctaaatgagttcttaaagaattctataagcaatagctgattaatgggccctggaagatgaagattataactgtttatttacctaattaaaaggaaaggcagtgccaaatatgagaggataaacaatattagttaacatttctgttatttatgatgccaattagtagtaagataattccacagctgtcaactttgtttggggctggcaacttctctgcttaaacaggctaaaagtttagtattctgggagaagtggctggaagaaggggtaatatggtgaaagcaaattccctttcccaggagtcaagagaatttatgtgaggtggctcccgcctgtaatctcagcactttgggaggccaaggcaggcaatcacctgagggcaggagaccagcctgactaacatggagaaaccccatctctactaaaaatacaa

SEQ ID NO: 501 - DNA, 2425 bp, Homo sapiens
cacacacacacacacacacacacattgggatgggaggggggtagggaggatgaaaaaatcaccattaccacctgaagcttttccattcttgttttaatagcattgatgatttgcaccatttggagatagagctctggcttatttattataaaacaggagctgggcacagtggtgcctacccacaatgccagctactctgaaggctgaggtgggagaattgctggagggcaattcgaaaccagtctgggcaagatagtgagacctcatctcaaaaaaaaaaaaagaaggaaaaaacaaaggagttgatgaaaccaaattatgacaaactaaattaaaaaattaaaaaatagcattagtgggaacactgtggtatttcctgaggtattaaaattttacaactagtaaaggtatttattataatttattcggattgtttcttagtttatttttgacatggataaaattattgtttatctaggagcctcagagttgagagaggatagttgtagagaagtatttctaaaatggaattatcatccactaccagctaagagaaaatagttacttgtttaaagataccttaaagcaacatatattgtagtttcaagagaacaggctgacagtcaagaaataggcttttaacaaacccactggtttgctggattctaattgcctccttcaaactatgtaattgtgtctttctggtttctgtggagatattttcccacttgtttaattttacactggaataaaacaagttatcactgttgatctgattacagaaactattttatataggacgctgtgaagagtagatattctctgagcccttcaaatgaactgtattaaaacacacacacacttttgaagtttgagaagaacatcattacctgtaacctttgatttgtgaaaatatatacaaaaagctaattttataatttagatggagagtgtgtatacaacttatatgtggtaatttatattacaaagagttaacattcagcttcctctaaataacaccaccctcattttcttggagtacctcaaactccgatgatctagaagctttataaccaggtctgcccttgaagactagttcacgcattaataggtgtctagggctgagcctcagcctccaatcacactcgacctgtataggctttcctgttcagagatatgcagtggccaaatcaaagtgtctgggtgattcatcgggagacaaatatattaatcaatgctactatgttaaaataccaatattgtcttgaagtgtgggaactctcttaaacaggaaaatgataagatattcagaagagccacaggcataacatggtgattctgcagcagcatgtcaccctccagtggtgagccactctacttattaaccgaggtagagaggtaaatgcaggagggactttgggcaatcctgggagggctgtctttgccgtaagactgatgtattgaaaaaaggaagacaggccgggtgtggtggctcatgcctgtaatcccagcactttgggaagccgaggtgggcagatcatgaggtcaggagatcgagatcatcctggctaacacaatgaaaccccgtctctactaaaaatacgaaaaaaaattaaccaggtgtgttggcacgtgcctgtagtcccacctactcaggaggctgaggcaggagaattgcttgaacccaggaggcggaggttgcggtgagccaagattgcgccactgcactccagcctgagtgacagagcaagactccatctcaaaaaaaaaaaaaaaaaaaaagaaaaagaaaaagaaagaaaagaaaaaggaagataaggaaattatatatgaatccaaaaggaaagggttttttgtttttggacacagggtcttgctctgtcgcccaagctggagtgctgtggtgcaaacatggctcactgcagcctcgaactcctgggcccaagggatcctcccacctaagcctccagagtagctgggactactggcatgtgtcatcacgtctggctaatttttttactgagaagggatcttgctatgttgcccaggctggtcttgaactcctggtcttgagcaatctttctgctttgatgtctcaaaatgctgggattataggtgtgagccacagtgcctagaagcctcattcttttttttttttttttttttgagacagagtcttgctctgtcgcccagcctggagtgcagtggcacgatctcagctcactgcaacctccgcctcccgggttcaagcaattctcctgcctcagcctcctgagtacctgggattacaggtgcccgccaccacgcccggctaatttttgtatttttagtagagacagggtttcaccatgttggtcaggctggtctcgaacccctgacctcgtgatccacctgcctcggcctcccaaagtgttgggattacagg

SEQ ID NO: 502 - DNA, 7471 bp, Homo sapiens
tctcctgatgatgatgcacagccttcagcgggggacatttaagacgcagaacaccaggtccaggctgcagctgcgggactcagaggcgaagcttgaggggctcaggaaggacgaagaaccacccttgagagaagaggcagcagcagcggcggcagcagcagcggcagcgaccccaccactgccacatttgccaggaaacaatgctgctagcgacattcaagctgtgcgctgggagctcctacagacacatgcgcaacatgaagggtgagcgctgcgggaaggaggcgatgaggggttggccagctctcagcggatgaggctcaggccacccaattctgatcctagttgtgcctcttactgggtgaacctgggcaagtttcttcccttcttgaatctcagttttcccctcggaagaagtgggctggttactaagatatatcccttccagattctataatttctggtctcccctccaggactccaatctttttttctccttttctttcatttttattctttttctttcttccttccctccttcctttcctttctttcttcctttcttccttccccttttccttcattcgttctttttttcttccgccttttcttttttttttgtttgaataaaggtctctgtcacagaggctggagtacagtagaacaatcatagctcactgcagcctcaaacccatgggctcaagccatcctcccacctcagcctcttgagtacctgggactacaggcgtgcaccaccacaaccagctagttttatttatttatttttatttttattttttttagagacaatgtcttgctatattggtcacgctggtcttgaccccctgggctcaagggattctcccaccttggcctcccaaagtgctgggattacaggtgtgagccgccacacctggcttactttattttgagatggagtctcactctgttgcccagcctggagcgcagtggcacgatctcggctcactgcaacctccgcctcctgggtagctgggattacaggtgcatgccaccacgcctggctagtttttgtatttttagtagagacagggtttcgccacgtcgaccagactggtcttgaactcctgacctcaggtgatctgcctcccaaactgctgggattataggcatgagccatggcgctcagcctattttatttttgaggcagtctcgctctgttgcctaggctggagtgcactggcgctatcttggctcactgcagcctctgcctcctgggttcaagcaattctcctgcctcagcctcctgagtggctgggaccacaggcgtgcaccaccatgcctggccatctttcttgaactattcctgactttgccttccttcagagctggacaagtcttgtagcaggggtacacaggaaagtcttgcccacagtggcagagtaaatattagacttgactcccacaggcaaaaaaagacggagaagagagataggggagtaagacaggagggcaaggtaaagagataagacggaagactggttatcattgaatagccaggaaggggcagaaaccagctacaagaggccacttttgtagagctgattcgcatccaaggtcatttgaatcaatcccctgctgccactgaagggtacacaagtcaatctaggcacgatctttccaattacactggattgaattagctacctttagagcgagaagccatgcttagatctgcagctggcagtggtgttgtcgtcctcactagatggacagggcttccctggcccagaatccaggggcacacagagtagcttatgcatgcaagcacacagactcacagaagcacagattcatgcaatcagattctggcaagcacacagacctcatgcaagcacagactcgtgcagacacacagactcatgcaagcacacaggcctcaggagttgtattctccttatgaagtaggatttttctggttgcttgaacacagctttttccccttttagagacagaaactccagcaggctctggtatagcccatctccaggcagggccaggcctgaccaccccagatggaaggcagatttctggaccctggagcactgccatgggagttgagggcctggctctagttcaggtccctgctagaatcctgtgtgctcctgagcaagtcacttccctctccaaaccaacttactcatttgagacaagatgagggggtggagtggtccatctctaaggggctttccagctcctagacaagggttattcccttctgcagggctgaggcaacaggctgtgatggccatcagccaggagctgaaccggaggccctggggggccccacccctagcacgtggattaaccaggttcggcggcggagctctctactcggtaagtgctgaggcttctgggctcctggtgctgctggcaggaggttccctggagggtgatgtggtgcatgtggctttggctcccctcctgccattccttcattttgagaggacgtccccagcctagagttcctcaaggccagatccctctctggtcacctggggcggctgtgattaactcgaccagcaggctggcccctatggctttagtccgggctcttcagagcaatgagcagacccagagctccagggatgagagctggtggaggctgggagaagaaggaagctctgtctctcctcggctgtgtatccaggttctcggctggaagagactctctacagtgaccaggagctggcctatctccagcagggggaggaggccatgcagaaggccttgggcatccttagcaaccaagagggctggaagaaggagagtcagcaggtaagtgtcggggagaagcctgtggttcctccatgctccactgccatcctcaaggccagctggggttactatttttcccagaattcctgtctcatgcagcagtcactgggtagcaagtggttttatcttgagaactctcctttctcgagaatatatcctcagataatgctcttcccccataaaagacaccctggagagtcctgtttgagaaacactattcctgtgtccttagttacagaataggattgcattgtgtgcccacttggcagacatcatgcaaggggaactccaagtgcctcattgccctgggtcagatatcccaacgatgccaaagtgcactgtctgtgctgtcagcccacctgtggctgggcttgcaggggtgatgtgggctcaccctacaacaggcctggactagaacacagagtggtccatggccttctggggttctctgcgcttgagcactgacccatcacaggggacagtaaccaggttcacggtaaaggctggtggctctgttatggagattttggtggctttaccttcagcaaaagctgacatgctgcccactatacaaagttcaggtagaacccttccttccctaagttctcagagtaatggagttaacagactactagtttgggagccaactgggacttaggtcggcactgctcttagttaagggtccctgggccaatcactgaccttctctggccccacattcttctggtgtggaatgaggtattgaactaaaacaaatcttgaagatcccattcaacattctatgtatctaattaagctggtgtaaaccacttttcccactcccaggtttctctcttgggatctttgagcttctgaagtcaagtaagagtcttttcagttggacctacccataccaccatcattcaccaccaagacaaagggtccagtggggctgggtgcagtggcttacgcctggaggccgagactggagaattgcttgagcctaggagtttgagaccagcctgggcaacacagggagatcacatctctacaaaaaatttaaaaattagctaggtgtaatgctgcttgcctgtagtctcagctacttgggaggccgaggcaggagaatttcttgagcctaggaggttgaggctgcaatgacccgtgattgtgccactgcactccagcctggacaacagagtgagacggtctcaaaaaaaaaaaacaagaaaaaaatcttaaaaagggtccagtggcagcaggtaacttcctccagttgtcagcagatgcacaaggccatggcaacaatgattaccgactctatcttaggacagttccaggcttcctcgtgctcaacttggagttcctttgctgttcccctccccatcttgccttgtattgcctatgggacctagactaagaatatatatatatatatataaaatttttttttttgagacaactctgtcgcccaggctggagtgcagtggtgcaatctccactcactgcaacctctgccgtgcaggttcaagcaattctcctgcctcagcttcccaagtagctgggattacaggcgcctgccaccatgtctggctaattttgtagttttagtagagacggggtttcaccatcttggccaggctggtctcgaactcctgaccttgtgatccacccaccttggcctcccaaagtgctgggattataggcgtgaaccaccatgcccggccaagaatatttttgtctaaccaccttctgggggctcctttctctgacaggacaatggggacaaagtgatgagtaaagtggtcccagatgtgggcaaggtgttccggctggaggtcgtggtggaccagcccatggagaggctctatgaagagctcgtggagcgcatggaagcaatgggggagtggaaccccaatgtcaaggagatcaaggtgagcaaagtccaggtgcgggtggcaggggcccaggagagcccagtgtgaatgctgtatcaaagagaggacccctagctgtggggggtgcttagcccaacacaggctgagtcgtgattctggttccccatggcctggtaggtcctgcagaagatcggaaaagatacattcattactcacgagctggctgccgaggcagcaggaaacctggtggggccccgtgactttgtgagcgtgcgctgtgccaagcgccgaggctccacctgtgtgctggctggcatggccacagacttcgggaacatgcctgagcagaagggtgtcatcaggtaatacgggcagcaggctccaaacccccctcttctaacacaggcctgcaggtgtgcacccaagcatgtggactgcatccccagctccaagaaaccaacccttggtgcacccatggcttccttctacaaaagaagatacttatttaccaaaggagggacaaagacaagataggccctacttggacagccagacagcttgtcatgaccctcccagaaagtttaagaaccttaataattttctgaagcatggggcagggctgaggttcacctggtacgctcaggaacagctgtaatgtagactaaaatattgaaataatccataccactcagtacaccacagcctcctgaatttcccaaggccccagcccagccaccagcctgaatcctttccctgacatcccagtaatccagcaactaaagggcacaagaggccgcaggggctgctccagctacaagcagcctttattctgatgagctggtaactgtgccaactgccaaataattaccctttgcaaagggcacttccctgatgagactcagaaaagacaaggtaccgtagaaacgtgttatctatggtactggtgtaagcagccagtgcaagagagaactcgcaactgtcctcctgacttgacttctccatttgccagggcggagcacggtcccacttgcatggtgcttcacccgttggctggaagtccctctaagaccaaacttacgtggctactcagcatcgacctcaaggtgaagggcatgggagggggacctggaaggcaggtggtagtgagaaaaacaggctcttcccattccccccatgctgcagaaagaatcctcttctattctgatagaatcacaggctgtaagacagggaagggtctggagtgatggcctaactgctactctaccatctccaaagcctgtgatggccccctcttcttttttttttttttttttcgagactcagtttcattctgtcactcaggctggagtacaatgacatggtctcagctcaccgtaacctccgcctcccggattcaagtgattcttccgcctcagcctcctgagtagctggaactacaggcgtgtgccaccacacatggctaatttttgtatttttagtagagacggggtttcactatggtggccaggctggtctcaaactcctgacctcgtgatctgcctgcctccaaaagtgctgggattacaggcgtgagccactgcgcctggccctcttctgtctcacagcaaagttcaactcttatatgtagttatcattttagaaagaaggaaacttaggtccagagatctgaagggtgaaaaaggcaacataactggttcagggtcacacagctgggaacaccaggctgaaacatcttgttggccagtcttgtgcttctgaaagtcatgacagcagaggagcaatgcagtcctcccgcccttgactgggcaactccaaggctgcacctattaacagagctcgaagaccaagcccctggcagcctgtttgtgatagggtgcagtgtcaagagtgggccaaaacccacaagatggccaaattctcctacctcctactgcaggggtggctgcccaagagcatcatcaaccaggtcctgtcccagacccaggtggattttgccaaccacctgcgcaagcgcctggagtcccaccctgcctctgaagccaggtgttgaagaccagcctgctgttcccaactgtgcccagctgcactggtacacacgctcatcaggagaatccctactggaagcctgcaagtctaagatctccatctggtgacagtgggatgggtggggttcgtgtttagagtatgacactaggattcagattggtgaaagtttttagtaccaagaaaacagggatgaggctcttggattaaaaggtaacttcattcactgattagctatgacatgagggttcaggcccctaaaataattgtaaaactttttttctgggcccttatgtacccacctaaaaccatctttaaaatgctagtggctgatatgggtgtgggggatgctaaccacagggcctgagaagtcttgctttatgggctcaagaatgccatgcgctggcagtacatgtgcacaaagcagaatctcagagggtctcctgcagccctctgctcctcccggccgctgcacagcaacaccacagaacaagcagcaccccacagtgggtgccttccagaaatatagtccaagctttctctgtggaaaaagacaaaactcattagtagacatgtttccctattgctttcataggcaccagtcagaataaagaatcataattcacacaaacatcagtctttgttttaatattgtactgttaaaaaaatctatgcagctgggtgcagtggctcacgcctgtaatcccagcattttgggaggctgaggtaggcgg

SEQ ID NO: 503 - DNA, 2113 bp, Homo sapiens
cacacacacacacacacacacacattgggatgggagggggtagggaggatgaaaaaatcaccattaccacctgaagcttttccattcttgttttaatagcattgatgatttgcaccatttggagatagagctctggcttatttattataaaacaggagctgggcacagtggtgcctacccacaatgccagctactctgaaggctgaggtgggagaattgctggagggcaattcgaaaccagtctgggcaagatagtgagacctcatctcaaaaaaaaaaaaagaaggaaaaaacaaaggagttgatgaaaccaaattatgacaaactaaattaaaaaattaaaaaatagcattagtgggaacactgtggtatttcctgaggtattaaaattttacaactagtaaaggtatttattataatttattcggattgtttcttagtttatttttgacatggataaaattattgtttatctaggagcctcagagttgagagaggatagttgtagagaagtatttctaaaatggaattatcatccactaccagctaagagaaaatagttacttgtttaaagataccttaaagcaacatatattgtagtttcaagagaacaggctgacagtcaagaaataggcttttaacaaacccactggtttgctggattctaattgcctccttcaaactatgtaattgtgtctttctggtttctgtggagatattttcccacttgtttaattttacactggaataaaacaagttatcactgttgatctgattacagaaactattttatataggacgctgtgaagagtagatattctctgagcccttcaaatgaactgtattaaaacacacacacacttttgaagtttgagaagaacatcattacctgtaacctttgatttgtgaaaatatatacaaaaagctaattttataatttagatggagagtgtgtatacaacttatatgtggtaatttatattacaaagagttaacattcagcttcctctaaataacaccaccctcattttcttggagtacctcaaactccgatgatctagaagctttataaccaggtctgcccttgaagactagttcacgcattaataggtgtctagggctgagcctcagcctccaatcacactcgacctgtataggctttcctgttcagagatatgcagtggccaaatcaaagtgtctgggtgattcatcgggagacaaatatattaatcaatgctactatgttaaaataccaatattgtcttgaagtgtgggaactctcttaaacaggaaaatgataagatattcagaagagccacaggcataacatggtgattctgcagcagcatgtcaccctccagtggtgagccactctacttattaaccgaggtagagaggtaaatgcaggagggactttgggcaatcctgggagggctgtctttgccgtaagactgatgtattgaaaaaaggaagacaggccgggtgtggtggctcatgcctgtaatcccagcactttgggaagccgaggtgggcagatcatgaggtcaggagatcgagatcatcctggctaacacaatgaaaccccgtctctactaaaaatacgaaaaaaaattaaccaggtgtgttggcacgtgcctgtagtcccacctactcaggaggctgaggcaggagaattgcttgaacccaggaggcggaggttgcggtgagccaagattgcgccactgcactccagcctgagtgacagagcaagactccatctcaaaaaaaaaaaaaaaaaaaaagaaaaagaaaaagaaaaagaaagaaaagaaaaaggaagataaggaaattatatatgaatccaaaaggaaagggttttttgtttttggacacagggtcttgctctgtcgcccaagctggagtgctgtggtgcaaacatggctcactgcagcctcgaactcctgggcccaagggatcctcccacctaagcctccagagtagctgggactactggcatgtgtcatcacgtctggctaatttttttactgagaagggatcttgctatgttgcccaggctggtcttgaactcctggtcttgagcaatctttctgctttgatgtctcaaaatgctggg

SEQ ID NO: 504 - DNA, 695 bp, Homo sapiens
tcaagactgagccttctcatgttctttatcctgcatatcagcacctgacaaatagaagggtagacaaacaagagtgatgcaggacaggcaagccctaaaattggggcttagcccaggagggttcatggcttcacccagaaagaattccagcaagcagcagtggtggtagccagcaagccgcagtgcacagagcagcagaggtactgctccttgtggagcagggctacccagaggcagtgtgcccagaagagcaacgcaggggcagggctgcactcatatggacatctacttttaattatatgcaaattaaggggtggattatgcagagatttccaggatgagggtagtaacttccaggtcatcaggtcgttgccacgaaaagggatggtaactcctaggttttgccatggcaatggtaaactgacatggcacactggcaggcatgtcatggaaagctgcttctgcccccctacctgttttagctagtccttaatttggttccatgtccgagccccgcctcctacctcaagaggactgaatcaaatgctctaaatcacttggttaattggcccaatgatagtaaataaattctatctccttatgcagaaggaagcccagatctttgacaaaactggaaggtctttgccaagaccccacagttaaccgtctgagcctcagactgtccttaaccagtg

SEQ ID NO: 505 - DNA, 14346 bp, Homo sapiens
atatgagctcaggcctggctgggctccaggagaatctttccacaaggcaagagataacacaaagtcaaggtgaagatcagggtagccctttaaaaggcctccttgtgccctagagttgccacagctcttctactccactgctgtctatcttgcctgccggcacccagccaccatgtgggagctcgtggctctcttgctgcttaccctagcttatttgttttggcccaagagaaggtgccctggtgccaagtaccccaagagcctcctgtccctgcccctggtgggcagcctgccattcctccccagacacggccatatgcataacaacttcttcaagctgcagaaaaaatatggccccatctattcggttcgtatgggcaccaagactacagtgattgtcggccaccaccagctggccaaggaggtgcttattaagaagggcaaggacttctctgggcggcctcaaatggtaagtggtgcccatctcctccctgcccccttcaccaccccctgggattgttcaggtcttcagaccatgcctagaatggggcttccagctccaacaacctgtaattcttcccaaagtagactagtgggatgatgtgaagggagtgaaccttcagacccccacccagcctctaaattaggcaggaagaattaaaggaatgtctcctctaccaggctgcccaggaggtgggatgggaggaccacagtggtctgaggggtcaaggaatcctcactccactcctctctctgagcctagacttctctaatggactgagaaggtgcatgtacagcacttagcctagcacccagcacagtaagtgccccttatacagccaggattcatgttacttttcatggaaaatgggggcagtgactactgtcctccatgaaagctgctggggagaattagcctagctattgcaggctgggattgctgctttcctggtgctatttccagctactcaggctcacaggggcagttttctacaatgacatttcagggttgctgatgagcctcccactcagcagggcccccagcctctcagcattttttttttttttttttttttttgagacagagtctctctctgtcgcccagcctggagtgcagtggccaatctcagctcactgcaacctctgcctcccgggttcaagtgattctcctgcctcagcctcctgagtacctgggactacaggagcatgccaccatgcccgctaattttttgtatttttagtagagatggtgtttcaccatgttagccaggatggtctcgatctcctgacctcgtgatcctcccaccttagcctcccaaagtgctaggattataggcgtaagccactgtgccctgccagcctctcagctttgatcaagccaagggttggtttattttttcttggaccaatcagccaggtctgctgaccaactacctagctcccacctctgctggcttcctcccgggggcagagaagatggagaaggctagtcatgtggatcttcagggtcaggaaatggaaaagggaggctttggacccttttgctttggggggcacctctaggaggaggcggctcggcccaagtccagactgggtagacaaaacatctgcactctccaaatgtgggcttgtggctgggtatgcaggcttgcaatggaagggtaaacctgagtgaggtgagctgtgcctttagctcagctaagggctcagggaaaagcagagatctgtgcagtcctcagcctctacaagctcacctgctccctaccctctggacaggcatagtttagagagtttatcccatccagagttgccttcctgtggtcagaaactgatgagcaaaaagaagcccagagggcaccctgtcagcgaaaagaaccccaatgctgctgcattctaattaagggttctttctttctccttgatctactgtatttctgaaggaattgggagtaggaggccttagggtctgtcctaccaagtccttgcagtcatggtggagtgcagtggggctgtgcccacatgggagtcagcatgccaggtacctgccttctcctccaggaaggaaagcagggaccagaggtgtaagggcaagagtggggtggatggtgtgagattcctacagccttgcctgctctctaaaggcaactctagacatcgcgtccaacaaccgtaagggtatcgccttcgctgactctggcgcacactggcagctgcatcgaaggctggcgatggccacctttgccctgttcaaggatggcgatcagaagctggagaagatcagtgagtgccaggctggcccctggggctggggctggatcccacaggagctgctggagggagaggagggttgggcaggggtaagggttaggactagagcgcaatgcagccttttcttggctactgctgccatctagtggccatctgctatctgtcccccgctcctgttaagaggcaactggtacagagagggggtaagggtgctgattcatttcccaccctcatgccccctctcccttcagtttgtcaggaaatcagtacattgtgtgatatgctggccacccacaacggacagtccatagacatctcctttcctgtcttcgtggcggtaaccaatgtcatctccttgatctgcttcaatacctcctacaagaatggggaccctgagttgaatgtcatacagaattacaatgaaggcatcatagacaacctgagcaaagacagcctggtggacctagtcccctggttgaaggtgagatgctgccagccctgccttcaggttctagtagaccctgacattgtccccaatcttccttcctttttacttcctgctccagccgcaatgacccatctttttcctgattacctccgccacctctacctcctctgccacttaaaacctttgccatttctctgcagagatagatttagccttttaattatgcaccttagtactccagataatgaccttcatttcttttccaattaccatgtgccagtactaagcattctatacgcattcatcgctgaattccccttggaagtaggttttattatccccattgtgcaggtgagaagcaggcttagcggggttaaggagcttgtctgagccttcaggctcatgtctctctcactcctaagggctggacacatagcagagtcagcgcttgatgtttgattgaatggggaaggagaggtggagaccacgccctcctcccttgtttagaattgtcttcgtcgtcatgataaacccgttctgtgtccccatcttgccttccattctggctgaaggtcaggggtggagtaggaacttccagagacagaaagctaagatccgcctccaggagagactctggcagctggagaagcaaaatggaagaagggtggatttaacatttctttttatttcccagattttccccaacaaaaccctggaaaaattaaagagccatgttaaaatacgaaatgatctgctgaataaaatacttgaaaattacaaggtaggtgatagagcagaagagaatatgagttaggctaaaagtaatcacaagagcagggtggagtccattctacacactgtagaagcttcaaaaccaagcagagaacctggcacatagtaggtgtacaataaaaactgacttaagggctgggcgcggtggctcacgcctgtaatcccaacactttgggaggccgaggtgggcagatcaattgaggtcaggagttcgagatgagcctggccaatatggtgaaaccccgtctgtactaaaaatacaaaaactaggccaggcaagatggctcacacctgtaatcccaacattttgggaggccaaggtgggcagatcacctgaggttgggagttcgagaccagcctgaccaacatggagaaactctgtctctactaaaaatacaaaattagccgggcacggtggcgcatgcctataatcccagctatttgggaggctgaggcaggagactcacttgaacccgagaagcagaggttgcagtgagctgagatcatgccattgcactccagcctgggcattgcaccaagattctgtctcaaaaaaaaaaaaaaaactgactcaaggagttgggatcgaaaagtgaggaactgaagaggatcctagaagagacctaacctctccaccaaatttaaagagggcccggggctgcctcctacctccacaagttcgtaggtcctgcccagacttgctctacttccaagtggaaggagccttgttatctctagtcagggacagaagtatggcaggagtgtcacagatggggctccttccttattaatgtctcccaacctcacccaacccaggagaaattccggagtgactctatcaccaacatgctggacacactgatgcaagccaagatgaactcagataatggcaatgctggcccagatcaagactcagagctgctttcagataaccacattctcaccaccataggggacatctttggggctggcgtggagaccaccacctctgtggttaaatggaccctggccttcctgctgcacaatcctcaggtgtgcttccccctcattgatcctagaccccagccagcccaatctctgggctccagagaaagggagagccaattctctcaggctttctgtgcaggaagactaggcctgccctgctccttacccaagcagtagttggctttgaccccagagtagagctgccccatcttctggaagccgggcctgggccccagagccactactgggaagggactggacaggctcttctcgatgtcacagttggattcttctctaagcccttgcttctcctgggcttacacacactagtcacctccaacctactctggtcttcaggtgaagaagaagctctacgaggagattgaccagaatgtgggtttcagccgcacaccaactatcagtgaccgtaaccgtctcctcctgctggaggccaccatccgagaggtgcttcgcctcaggcccgtggcccctatgctcatcccccacaaggccaacgttgactccaggtgtgcctgccctcccagtgacatctagccccatgatgcattcaacactgcttgccagcccacctggctccccctacccccggcccctgctggccaacctaaagtcagtcaaccatcaactactaaaaatcatcctgccggccgggcacggtggctcacacctgtcatcccaacactttgggaggtcgaggcgggtggatcatgaggtcaggggttcaagaccagcctgaccaatatggtgaaaccccgtctctactaaaaatacaaaaattagccatgcatcgtggcgcgtgcctgtagtcccagctactcaggaggctgaggcaggagaatcacttgaaccaaggcggcggaggttgcagtgagccaagattgcaccactgcactccagcctgggtgacagagcgggactctgtctcaaaataaataattaattaattaaatataaaaatcatcctgcccccagccccgtggctccatgtctctaccacctacagacacgcattgactcatccacagatctgcctgacttcccagaggagcttcctgctgccctcagagacatgtggtctgggatgaaaggctgggagctccatgttccaaccagctgcagcacgcacataacatgcgctgcagctccaaacgcacacccacatacactgccagacaccaaagtccacagacacaggtgttcagacagaagcgcctgttaggagggaagggatggagaagggctggatttaggtttgatctggcagaagctgaggaaaacatgagtgagtgggaatgagggagtaaagggcattttcctcacggcggaagaatgagggggcatgaggctgagcaaggaagggagtacgaagtcccagacccacttttcctcttccactctggagcagcatcggtgagtttgctgtggacaagggcacagaagttatcatcaatctgtgggcgctgcatcacaatgagaaggagtggcaccagccggatcagttcatgcctggtgagtctgtcctgtcctgcgccctgggccacacagcgagcctggactctgctccaccaccccagtaccccttcacctctgccaagcttgctgctagaaaactcttggctccaactatacggacctgttgacaccctcatcctgccatagacttacccaaactcttcacagctgggtttcccacgctcttcttccaaccaactgcaaattcaccctccaagaagccctctacgcctctgtctgccattaagtctgtcccttctcccctcggatggtgctattttcataggttaattccatctcttttccatccttcctgaatatttcatttcctctgtgtcgttaagggctacctgaaagcagggctgtatctctccccaggcgggggttcccccataataaggctacatcctcagatcagggttccctgggcagggccatgtctccccctcaaccagggcagaaccatgcctctcctccctcctgccctaacccctggctgatgccactccttgcctgcagagcgtttcttgaatccagcggggacccagctcatctcaccgtcagtaagctatttgcccttcggagcaggacctcgctcctgtataggtgagatcctggcccgccaggagctcttcctcatcatggcctggctgctgcagaggttcgacctggaggtgccagatgatgggcagctgccctccctggaaggcatccccaaggtggtctttctgatcgactctttcaaagtgaagatcaaggtgcgccaggcctggagggaagcccaggctgagggtagcacctaaaggctgtaactcacagcccctgtccaccctatgtggccccacaacacagatttagagatacaaccccccacccttctccgccattcttccctactcccaacccactctgccttctttttcagcttgtggcaatgccagtgatgtgcataaacagtttttttttttccataaggtccctgagtagttcatttatgtattcatttgctcactcattctttcaacaccgattttattgagcacctactatgtgccattcactttctcaggacactcgagctccgtggtctctgaagcttacattctagtgagggctaacaagtgaataagttcagagactcgtaagtgctttgaagtcaatcacaatttgtgtgatgtgatgagaaaatggcagaggcagtgggtggctgctttgaacaaggggtcaggaaaagtgttgcatgctgagaagcaggtaaaaaggcctccaggtgggagaggtcagcatggccagtgaaggggagagtgggccctgatgaggtcagagtggacatagtggtccgttcccactgtagctgggattacaggaggccaggagggaggttgggttttattctaattatgacaggaagtcactggaggattttaagtatgtaagtggaacaatctgtttttttgtttttgtttttgtttgagaaggagtttcgctcttgttgccctggctggagtgcaatggcatgatcttggctcactgcaacccctgcctcctgagttcaagtgattctcctgcctcagcctccaaaatagctgggattgcaggcgtgtgccaccatgcccagctaattttgtatttttagtagagatgaggttttgccatgttggtcaggctggtctcgaactcctgacctcaggtgatccacccatctcggcctcccaaagtgctgggattatagacatgagccacagcgcctagcctgttttttgttttgttttgtttgggtttttttgttgttgttttttgttctgttttttgagtgacatggtctcactctgttgccaggctgattgcagtggcacaatcatggctcactgcagcctcaacctcccaggctcaagtgatcctcccacctcagcatcccaagtaactaggactacaggcacacatcaccaggcctgactaatgttttactttttgtagagatggggttttgctgtgttttctaggctggtctcaaactcctaagctcaagcgcttctcccacctcagcctcccaaagtgtttggattataggcatgagccgctgtgcccagctggtttgtatttctgaaagatcgccgtagttgctgtgtggagaatgttctgctaagggatgggagtgggagcaggagaacagttaggaaggaggctgttgtgctggtccaggaaagccagatgttgatgagttaaaccacggccacagcagtggaaacagtgagaagtggtaggattgagtttatcttttgttttctgtttgtttgtgtgtgtgtgtgtgtgtgtgtgtgtgtgtgtgtgtgtgtgtgttttgagacagactcttgctctttcacacaggctggactgcaatggcacaatctcagctcactacaacctccacctcccttgagcgattctgctgcctcagtctcccaagtagctggaattacaggcgcctggataatttttttatttttaccagagatggggtttcgccatgttggccaggctggtctcgaactcctgacctcaagtgatcccacctcagcctcccaaagtgccaggactacaggtgtgagccaccgagcctggcctgagtttatattttgaaagtagggcaggccgggcgtggtggctcgtgcctgtaattccagcactttgggagtccgagatgggtggatcgcctgaggtgtggagttctagactagcctgcccaacatggcaaaaccccgtctctactaaaaatacaaaaaattacccgggcgtggtggcaggcacctgtagtcccagctactcgggaggctgagacaggagaatggcgtgaaccccggaggcggagcttgcagtgagcggagatcgcgccactgcactccagcctgggcaacagttcaagactctgtctcaaaaaaaagaaaaaaggaaaagaaaaagaaagtagggcaaaagtgttgtttgttttgatccaaataggcttcactgcatgttacctcacaggttcgaccttgggggagtgtatgtgacccacagactggacctgccgttgccatccctctgtcttggtctgcaaagaccaagactggtgtgtccccctttcctcacccttccctggggtaaacactgccaggtaagggcttctacagctgtcttctgcagcagtgcctgggttccacctccttctccccactcaaaaaccccaggaagtctgtaaaagcttcctcactagggctgggtgcagtggctcacgcctgtaatcccagcactttgggaggccgaggcgggcagatcacgaggtcaggagatcgagactgtcctggctaacacgatgaaaccccgtctctactaaaaatacaaaaaattagccgggcatggtggcgggcacctatagtcctagctactcgggaggctgaggcaggagaatggcatgaacccgggagggggagcttgcagtgagctgagatcgcgccactgcactccagcctgggcaacagtgcgagactccgtctcaaaaaaaaaaaaaaaaaaacaaagcttcctcactagaaaatgaagccctgactcctttatatctggaaactggtatatttaaaccttggtcattggccagtctgcaaatgaatgtcctgagacatcccggaagaaactgacccttttagcctagagagaggccccatccccagctccctggtgccagccagaccagggtcaggtcatcaacaacccagtccttcccctctgactagacagaaggacgtcagcagagcatggctgataccctgcctagctaagtcttagagagaagacgtccctatagggagcaagacaaggttttcagttacgacactaccttcttccttataaagagctttgttaatcaggtggcagtggaccgttccctactattccctaactcggtcttggccttcatctgccatttaccctgggactttgctaaagagcctgcaggaggccaagtgtggtggcttatgcctggaattccagcactttggggggcctaggcaggaggatcccttgagcccaggagttcgagagcagcctgggcaacagagtgaggccctgtttctacaacacttaaaaaaaaattggccgggcgcggtggctcatgcctgtaatctcagcactttgggaggccgaggcaggcagatcacaagatcaggagatcgagaccatcctggctaacacgatgaaaccctgtctctactaatgatacaaaaaattagccgggcgtgctggcaggcgcctgtagtcccagctaatcgggaggctgaggcaggagaatggcgtgaacctgggaggcggagcttgcagtgagcagagatcgcgccactgtactccagcgtgggcgacagagcaagactctgtctcaaaaaaaaaaaaaaaaattacccaggcatggtggcatacctgtagtctcagctactcaggaggctgaggtgggaggattgctggaccccaggaggccgaggctgcagtgatctgagatcgtgccactgcactgcatcctagagcaagacccaatctctaaagaaaaagaaagaaagaagaagaaggattagtatttcactttcctgccattcaatgttctggttcaatagttggagaatgaaagagtgcatatgtgtgttggggggcagagtgagagagagaaagagatgaagatatatgggaacctatagacagacaaacagatatagatagatgtaatatgcaccaggtcagtatctgtcaaagtgtggctcacagaccccttgagccagactcatctgagaaacttacttaagaacacagactctggtccctatctttcatgcattgagtacactctgggagcagggcctggaaatctgcattttacaggctatccaggtgaatcttgtacacactgctgcgcaccccccccgagtcctcaagtgacattgtgtgagattcttgcaaacttgcgatgttttccatcccagttaaacccacccaccacttccacagaggacacagatcttctgctaattgcttatctcttcatcactagtctacaaaatgcctttcaggccaagcacagtggctcacacctgtaatcccaacactatgggaggccaaggtgggcacaacgcttgagctcaggaatctgagaccagcctggccaacatggtgaaacctcgtctctagctgggcatgttggcgcacacctctagttccagctactcaggaggctgaggtgggagaatcgcttgaacccaggaggtggaagttgcagtgagccaagattgtgccactgcactccaactgggtgacagagtgagtgagagagacgccgtctcaaaaaaaaaaaaaaaaaaaaaaaaaaaaagcctttcaaattctgagcaaatctgaaatacttaactttcctccagccaatcttattcccctctgctttgagctgaggatagcttgactcgatccagcacccagctgatgggggcagaggaaccgggagagggaagggacaaactccagtatagcctttcccttgggctcactgtggtgtcagcatctctcccaggctgcttgtgatgggggctggggtcagctgcccacaagctctcctacggacttcattttttttttgagacagggtctcactctgtcacccaggctggagtgcagtggtgcaatcatggctcaccgcagtctggaacacctgggctcaagagagcttcctgcctcagcttcctgggtagctgggactacaggtgtgtgccaccactctggctaatttttaagttttttgaagagatggggatcttattatgttgcccaggctggtctcaaactcatggcccctagtgatccttctgccttggcctcccaaaattctaggattacagatgtgagccactgtgtcctgtctaaaccttcattttgaaggaaactgagggccattgtgtgggctgggtatagggtatgacttgccccagatcacacagctacgtagcagcagggctgggaccagaactcaagatttcaatggtgcatggtggggagccagccatgctttcccacctgtcccctgtggtcatgcagaagggctcttgggatatttggccgggagagtacctttcaggcaagcggagtgaccttttagaaaatgactttatgaactttgactcctgcccaaactgtgctctcccgtctggaaggccttttcaccactgatctaaacccacctgccttgaggctcagacacattttttatgactcctgagtccaccatgaccatccctcttcagcactcagcttctgttccttggtactgaacctaaactgaaccttggcatctgagcatctgcctggacttgaaatgggtggggccccccacagacactgtccacctcctgtacctctggagttcaagactgagccttctcatgttctttatcctgcatatcagcacctgacaaatagaagggtagacaaacaagagtgatgcaggacaggcaagccctaaaattggggcttagcccaggagggttcatggcttcacccagaaagaattccagcaagcagcagtggtggtagccagcaagccgcagtgcacagagcagcagaggtactgctccttgtggagcagggctacccagaggcagtgtgcccagaagagcaacgcaggggcagggctgcactcatatggacatctacttttaattatatgcaaattaaggggtggattatgcagagatttccaggatgagggtagtaacttccaggtcatcaggtcgttgccacgaaaagggatggtaactcctaggttttgccatggcaatggtaaactgacatggcacactggcaggcatgtcatggaaagctgcttctgcccccctacctgttttagctagtccttaatttggttccatgtccgagccccgcctcctacctcaagaggactgaatcaaatgctctaaatcacttggttaattggcccaatgatagtaaataaattctatctccttatgcagaaggaagcccagatctttgacaaaactggaaggtctttgccaagaccccacagttaaccgtctgagcctcagactgtccttaaccagtgatgtgatgataaataaatgtttaacaaccaggtctgggaggggcgggggtgtgcggaatagccttgatttgtaatgtttgctgattactgtggtgtagatactcccaacgtgaccaattttaaactaccaatgtgatgccagtaaacagggttggaaagagacacatagtagcattatatgttctttaccgttgttattattacatagtaaatgccattatgtagtatttccaccatactgataggtaaatgtaaataacctcaagggcacagataacagtaacatgtagtaaaataactaggaaatgatcagttttgagtatctattacctttgtttttaatataactcaattgtaggtttaagttttttaaattggctgtttcatataaacagctcataaaattcctgaaaatttaaaaatcagttctagtgagctattaagagccaaccctcccaggagaaatgggccacgcttgtcttaaagaaaagcagttcctggctgggcgaagtggctcatgcctgtaatctcagcactttgggaggccgaggcaggtggatcacctgaggtcaggagtttgagaccagcctggccaacttggtgaaaccccgtctctactaaaaatacaaaaattagcggggtgtggtggcgtgcacctgtagtcccagctactcgggaggctgaggcaggagaatcactagaactaggtggaggttgcagtgagccgagattgtgccactgcactccagcctgtgagacagaacaagactccgtctcaaaacagacaaacaaaaaacgaaaaggagttcctgggctggggacagtggctcaccacaccagcactttgtaatcccaccactttgggaagtcaaggtgggtggatctcttgagctctggagttccagaccagctgggcaacatggtaaaaccccatcactacaaaaaaatacaaaaaattagccaggtgtagtggcacatacctgtggtcccagctggtcccagttacttgggaggctgaagtgggaggatcacattgaacccaggaggtcaaggctggcagtgagtgcgccactgcgctccagcctgggtgacatagcaagaacttgtctcaaaaaaaaaaaaaagaaaaaagagaaagaaaagcagttcccctgagtctccttgttgacaggagggaaatccttccctattgtgggagggtgagagt

SEQ ID NO: 506 - DNA, 98 bp, Homo sapiens
cctgtaatctcagcactttgggaggccgaggcaggtggatcacctgaggtcaggagtttgagaccagcctggccaacttggtgaaaccccgtctctac

SEQ ID NO: 507 - DNA, 635 bp, Homo sapiens
taatacttttataatttcttatgcctgtctttactttaatctcttaatcctgttatctttgtaagctgaggatgtttgtcacttcaggaccactgtgataattgtgttaactgtacaaattgattgtaagacatgtgtttgaacaatatgaaattagtgcaccttgaaaaagaacagaataagagcaatttttagggaacaagggaaaacaaccataaggtctgactgcctgcagggtcgggcagaaagagccatattttccttcttgagagaggctataaatggacatgcaagtagggaagatatcactaaattcttttcctagcaaggagtattattattaataccctgggaaaggaatgcattcctggggggaggtctataaacagccgctctgggaatgtctatcttgtgcagttgagataaggactgagatacgccctggtctcctgcagtaccctcaggcttactagggtggggaaaaactccgccctggtaaatttgtggtcagaccggttctctgctgtcgaaccctgtttgctgttgtttaaggtgtttatcaagacagtatgtgcaccgctgaacatagaccctcatctgtagttctgcttttgccctttgccttgtgatctttg

SEQ ID NO: 508 - DNA, 702 bp, Homo sapiens
gctcactgcagcctcgacctcccaggctcaggtgattctcccaccccagcctcccaagtagatgggactacaggcatgtgccaccaagcctaatttttgtattttttgtagagacagggtttcatcatgtgtcccaggctggtcttgaactcctgagctcaagcaatcctcccacctcggcctcccaaagtgctgggatgagccactgcgactggccccacttaatgggttttcagaggtgggagcaaagaatgaagggaggaagagagctcccatcttttccattactgtatttacttaaaactggaaaaaactgaatcactgggatggtatttcatttatcttttgaaatgaagaatagatacattaatttaaatgattctctaaagactgtccttcagcatccctaaagcatttcaacactataggcacagtttttattttatctttctggcacctggtttgggctttgggcttagattaaaaagacgagccttctcctgcccctgctcccttttattctctgccatctgctaagctcgactttttatctctcaggccaaatttgactctgcaagggactttgcataacgtttcatcctcagaatcgctaatgatgggcagaggactgttacatttgttgggagggattaaagtatatgacctcagtgccacttaaaaaataaatactgtctcaactat

SEQ ID NO: 509 - DNA, 528 bp, Homo sapiens
ctcgaactcccgacctcaggtgatctgcccgccttggcctcccaagtagatgggactacaggcatgtgccaccaagcctaatttttgtattttttgtagagacagggtttcatcatgtgtcccaggctggtcttgaactcctgagctcaagcaatcctcccacctcggcctcccaaagtgctgggatgagccactgcgactggccccacttaatgggttttcagaggtgggagcaaagaatgaagggaggaagagagctcccatcttttccattactgtatttacttaaaactggaaaaaactgaatcactgggatggtatttcatttatcttttgaaatgaagaatagatacattaatttaaatgattctctaaagactgtccttcagcatccctaaagcatttcaacactataggcacagtttttattttatctttctggcacctggtttgggctttgggcttagattaaaaagacgagccttctcctgcccctggctcccttttattctctgccatctgctaagc

SEQ ID NO: 510 - DNA, 702 bp, Homo sapiens; identical to SEQ ID NO: 508

SEQ ID NO: 511 - DNA, 583 bp, Homo sapiens
cctgggcaacagtgagactccgtctcaaaataaaaaacaaaaaaaatgtaaaaaataaataattgtattgaatttattagttgtgtctcagtctccttcagtctacgggttaggcttgcttttgcacctttgcattttaaggtaagaggctattgtgtaaactcgaattgggtttgttggtgtttcttcatgatttggttcaggctctgcattttgggcaggaatattcagaggtaatgctgtgttcctcccataggatcgtatcaggcgacacatgattatgaatttccccattattggtgatgtcacttagttgtgttgtctgccgggttctgccactgtaaagttaataagtattttgtagggaagtgctttgagactaaatatcctgttcctcatcaaacttctaccccctagtttcagtatctattgctgctttttggctgaataactatgatagttgccaaatagtggtttctgatgcttccattccttctacactgattggttggtattttgtacagaaaagctttctcatatctgatttacttgtctcaatatggacccatgggtatttgagttt

SEQ ID NO: 512 - DNA, 687 bp, Homo sapiens
tcagtggtgcaatgatagctcattatcacctcaaacttctggctcaagccatccctccgcctcagcctcctgagtagctaggactgcaggtgggcaccatcatgcctagctaattgttagatcctttttttttatgttctgcattttttcagttatttttacatatttctctcttgatccatgcagttataggatatatccttaattttagaaagtaaggacttttcgaccaggcgtggcggctcatgcctataatcccagcactttgggaggccgaggtgggcagatcacttgaggtcaggagttccagtccagcctggctaacatagtgaaaccccgtctccactaaaaaataaaaaatcagcccggcatggctgtgggcgcctgtaatcccagctactcaggaggctgaagtagaattgcttgaacctgggaggcagaggttgcagtgagccgagatggtgccattgcactccagcctgggtgacaagagcgaaactgcatctcagaaacaaagatgcctagctttcaccttgttgatgtttttctaaattttggaataataaatttatataggaatactgcaagaatagtccatttttttctgatgtcccaacatcaccaaatgtatccatcacaagtaggaatacatggaaacattaatgccagccactaaccattcatgtt

SEQ ID NO: 513 - DNA, 583 bp, Homo sapiens; identical to SEQ ID NO: 511

SEQ ID NO: 514 - DNA, 12613 bp, Homo sapiens
agcaggggccaagtgtgttcttctcattctatcggtgccacagccagggccgcggttgtgcagccgtgtggatcagctcagcccgtcctcacccagccgtgtgaggaggccgaggccacacaggtggatggccttcccttagagtactttccagagcctgggtgcttagccgctatgccccatgtttaatattcttgtgttccaatgtaacaactttaaaattacacaggataacactcttgataacattttaataaatgggtgtttttcttttcaagaaattttgacttgcacttcagatttcctttttaatattttcgttgagcggaaccttgctattccataagaggatgtgtccagtgttgtggaagatttcatgttttaaatcctttgtacagaaatcctgctcccaagtcacagataggctgacgggtcagagggcaagacgtgacccagggccgagagggtgagtgaccaggaaaatcggattcatcagttcacttgtttgtttcagaaacgtgcacaaagacctgctgcatgaggccctcgtcttcagtttctgtttcatgcccagcattaaaccaagtatctcattttgccaatttgacttctgtaggggccatggcacctgcaaggtgtttctcagcaagattgaggaccgtgtttcagggcgtggggcattgggctttgtccacatgggctggcctgaagcccagccggctactgccacagcgggcttctcccaggctgctctcggtcggccgtgcggacctcgccaagcatcaggaactcccggggaagaagctgctctctgagaaaaagctggtgagactcctggagttagagcagcttgcctgtctcctcctcagaaggcacagggtgtggtttcgggtcctcctctgggtctcatctctgttgatgttagttgatgatcttagtgatggggcacgtggagcttcttgaaaatgacagggtgaaacgcaggcctgcgtgctaaatcccacgctcagcaaatcccagcaggctgggagaggcgctgcgtgcttggaaagccgtgatacaggctgctcattttcccatgagcctgtgtattttacatgtatgttacatatatcctttcatatgtgtggctatttcttaatttaaaacaaatgcggaggctgggcacggtggctcatgcctgttatcccaacactttgggaggctaaggcaggcggatcacttgaggtcaggagttcgagaccagcctggccaacatggtgaaaccctgtctctactaaaaaaaaaaaaaaaacctttttaaattaataaataaataaaaataaaacaagtaggggggaatataccttccgttttatggttctttaagccttataagtttttcttgttctatttaccaaaacctcctatttaaagcatgaattgtctctaataaattcaagaaaatgcacgtttatgactcccttcgtttcctgctgaatggaggggctccagataagcattactgggacaaacagcacttccagtggaaaagccgctttggtgggatgtgtgctcaaatagctgaagcgttagcacaggcttgtctcctccccaggagagaaagtgagtcgaggttttgtcctccacgaagtgctcaccagtggggctttcctccctgtctggtggattttgcttgcgttggcgcatgacagcattacacattgaaatttggaaataacagttcgtggttttcccacatggtggtgccaaagaatcttagaatgtttgtgttttaaatttttaaatttttttttgtgtttaaatttttgtgtttaaaaattttaaatgttttaaaattttcttttaaaagaaaaaaaaactgcatttgaggagtattggatcggagtgcagaggcagcagccctgggtggctgtcaggggcagggcacgtctgtctgtgcacgtgggcagatgccaggtgtcctccccagcgtgtggtgaggttgcagcaccctgggctgcgggagctgaccctcctgtggtaggagctgttgtgtgttgaacagtaacctggttggttctctctcttcatccagattgcacctaccttagtgacctacagaacagctttcctagccgggcacagtggctcacgcctgtagtcccagcactttgggaggccgaggcgggtggatcacgaggtcaggagatcgagaccatcctggccaacacggtgaaaccccgtctctactaaaaatacaaaaaactagccgggcgcagtggcgggtgcctgtagtcccagctacttaggaggctgaggcaggagaatggcatgaacctgggaggcggagcttgcagtgagccgagatcccaccgttgcactccagcctgggcgacagagcgagactctgcctcaaaaaaaccccaaaaacaaacagctttccctccagcgaggggctctgtttgcctcaccacattttttaaatgagccctgttttcatcaggccccagaaatactctttcttcagagtcgaaagcctggtaattgtccaggaacgattctaacttcctatttctctatcgcatcctgggaaactagaactttctaagagtaaagatctatgatttcaggaatggtttttttgaatggaaagacacattatataaggaatatttcctaaacaagatgtgggttttttagcttagaaatgctgatttttgttgttggtttttaaatcagtctcacccagagtaagaaatgctgaatttttgaagtgtaggtccacacagaatacttacatctgcattgtggatttacctcagtctacaaatgcaactgacttgtggagactgttttttatcttcggaatttagaagtgattagcaatattagtgtcattaacctctaattttaataggctgttatagatagaagatgtacatctcaaatggatgcatggtgtcttgaaaggaccttggagtgttgagatgacgtgggatatttgtgttctctgtagaaaaggtactttgtggactatcggagagtgcttgtctgtggaggaaacggaggcgctggggcaagctgcttccacagtgagccccgcaaggagtttggaggccctgatggaggggacggaggcaacggtggacacgtcattctgagaggcaggtgccctggggcagtgcagcggggttgaggaggggccccgagactgcatgtgcatttgaactaaaaacctgatgtatgggcaggcacagtggcttatgcctgtgatcccagcacttggagaggctgaggcaggaggatcacttgagcccataagttcaagaccagcctggacaatatagcaagaccatgtcttttttgtttgtttgtttttttgtttttttttttttgcctcaaggtttgtggatctacaaaaaatttttgaaaaaattagccagacatggtagcgtgcacctgtggtcccagctactcaggaggattgctggatcccagaagttcaaggctgcagtgaatcgtgatcacaccactgcatattccagcatgggtgacagagcaataccctatctctaaaaaaaaaaaaagtaaaatttttaaaacccagctaggcgcagtggctcatgcctgtaatcccagaactttgggagaccgaggcgggtggatcgcttgaggtccggagttcgagaccagcctggccaacgtggtgaaatcctgtctcttaaaaaataataataataaccagatgtggtggcacacactgatagtcccagctacttggggctgaagcaggaggatggcttgagcccaggaggtcgaggttgcagtgagctccgattgtgctgctgcactccagcctggccaacagaggaagaccctatctcaaaaaaacaaaacaaaacaaacaaacaaaaaaaaccctgatgtatggatatcatttttataaattatatggatattcagccgggcgtggtggctcacacctgtaatcccagcactttgggagaccgaggcgggtggatcgcttaaggtcaggagttcgagaccagcctggccaacatggtgaaaccccgtctctacaaaaaatacaaaaaaaattagctgggcgtggtggtgggcacttgtaatcccagctactagggaggctgaggcaggagaattgcttgaatccaggaggcagaggttgcggtgagctgagatcgtgccattgcactctagcctcggcaacaagagtgaaactccgtctcaaaaaaataaaaacataaaacataaaaaaaaaattatatggatattcatagttaagtagcacacccaaaaaagcaactttgaggccaggcgcagtggctcatgcctataattccagcactttgggaggccaaggcgagtggatcacctgaggtcaggagttcaagaccagcctggccaatatggagaaaccccatctctactaaaaatagaaaaattagccaggcgtggtggcagatgcctgtaatcccagctatttgggaggctgaggcacgagaattgcttgagcccaggacacagatgttgcagtgagccaagatcatgccactgcactcctgcctggctgacagagcgagactctgtctaaaaaaaaaaagaaaaagcaactttgaacatgttttgttttgtttgtttaatttcaggagcacagagagtttcctgtcagggaagctgacatgtcggtcgcgtgaaagcacgaggcctgtgtggtgggttcggtgggtgccgctggctgctggttatattcacactcagcatagacgcatagcgagctgggagtgaagccttcacaacaaaagcatagaatacagctactgtaaaaaataagaaatttaaaaattttcagaaatgatagcactttttgaaggaaaataaggatttcatttttaaaaaatcactttgctggttttgtaacttctgctgcaccctcactccatgcttccatacctatttttaaggttcttaaactggacccagacacatcagcaataggccatggttgtcgtaacacaaagggactgagattcttgttcttgctttagttgaccagcaagtcaagtccctgtcgtcggtcctgtcgcggtaccagggtttcagtggagaagatggagggagtaaaaactgcttcgggcgcagtggcgccgtcctctacatccgggtgagccgagactgccggacctggccctgtccccgttgttctggatcatccagctcctgggggccaccgtgtgacccacggggcccctgtggcttgatgcccacagctaggaaacagcacaatggaaacggaggctggcagacagcgggaaagcagccccacccctcaaagcaaacccagacgggcatttgtaccagggtctcacaccatgtgcatgtctagtgaaaaagtcatgaaacgattctcttttaaaaagagggagcccacggcacggacgcttcctccgtctctgaccccatgagccgacctctgactgagggaggccactggcacccagcgggcctgcgtctccttcgcgagctgaattcactcgtctcttagatgttttttctggtgcttcagttcacactaacgttttagaaacactatttgaaaaagccctttgtgcagtcagaagggtgtgtacgcagccccgtgaaagccctggagcactgggaccttttccttgtgctccggagctgttggcagaggtgagtggggcgggcagctgcccggggcacagtccgctcttgtcttctttccttagcgcttgcttcaggaatgggttaaggcctcctttcctcactgctggtagagctcagctgatgagtgcctgctgttccccaggtccccgtgggcacgctggtgaaggagggaggcagagttgtggccgacctgtcttgcgtgggagatgagtacattgccgcgctgggcggggcaggagggaaaggcaaccgcttcttcctggccaacaacaaccgtgcccctgtgacctgtacccctggacagccaggacagcagcgagttctccacctggagctcaagacggtggcccacgccggaatggtaggtgtccccactgccaacagcatctgcacacactcagctctagaaaatccacttttctcaatggggatttgccagtggcctggaagagaacagctttgcgactcacctttttcccatcagtacactgctgacttggtcgtgagcatgagcccttgtgactcccccagccctgaaatcctccctccaatcccagttagttacagactctgcgctaacaaaggtgctgccgcgggccgtgccaccgtcttccctctttcccccaggtgggattccccaacgccgggaagtcctcactgctccgggccatttcaaacgccagacccgccgtggcttcctacccgttcaccaccctgaagccccacgtcgggatcgtccactacgaaggccacctacaaatagcaggtagaacttccagaattctcccaaaggttagatttaaatgatgtaattcagaaaagtaatgatgtaactcttaaatttagctttctgtttaaaatgtagcattgttggccaggcgtggtggctcacacctgtaaccccagcactttgggaggccgaggcaggcggatcacgaggtcaggagatcgacaccatcctggctaacatggtgaacccccgtctctactaaaaatacaaaaaaattagctgggtgtggtggcgggcacctgtagtcccagctacttgggaggctgaggatggagaatggcatgaacccagaaggcaaagcttgcagtgagccgagatcatgccactgcactccagcgtgggcgacagagcgaaactccatctcaaaaaaaaaaaaaaaaaagtagcattgtttttcctaatgtaaacaacttttttttttttttttttttgagacggagtctcactctgtcaccctggctggagtgcagtggtgcgatctcagctcactgcaacctccacctcccatatttaagtgattctcctgcctcagcctcccaagtagctgggattacaggcgtgcgccaccacgcccagttaatttttttgtatttttagtagagacggggtttcaccatgttggccaggctggtctcgaactcctgatctcaagtgatctgccccccgccccaccttggtctcccaaagtgttgggattacaggcgtgagctactgcacctggccctaatttaaacaattttcatcagcctgttctctatgaaaatcaggttcccaccccatcccctaggaatctgtcagttacagttcagaaacctgcattgaaattccagccgaggacagtatttcttcccactctatttgtcccctctcatctgtggaagctcagcagcatcacaacacgtgacttaaaagctttccttgtgccgtttgagagaataaaactttttcccagaagacaatacacccattaaaaatagtaagcctgctggtaaggttatttggatggcactttatatctgcagagtactctacatgtaaatttctatcagtaatcaaatgattagtagagtacaggcagccattttcctcttttttgaatcctattagaagcagaaagagaaggtatgaaatgtactctactagatagatccatcgccacgctggtctcccaaacatctccaagcattgaattcctcaggtgtcagttggcccagtgaatcacccaggtgctaaatcaaatggcttcagttcaaggcgttccttgaaaggaaagtgttagaactcaggaaatccgccttcgcagtgggctccaggccttctctcccaggctcgaggtggaaggcgctcttgggtgctgggtgtgccaagtggtcacctcgtgtgcccctgtcttccctgcagtggccgacatccccggcatcatacgaggcgcccaccagaacaggggtctgggggggatcctctagaaaatccacttttctcaatggggatttgccagtggcctggaagagaacagctttgcgactcacctttttcccatcagtacactgctgacttggtcgtgagcatgagcccttgtgactcccccagccctgaaatcctccctccaatcccagttagttacagactctgcgctaacaaaggtgctgccgcgggccgtgccaccgtcttccctctttcccccaggtgggattccccaacgccgggaagtcctcactgctccgggccatttcaaacgccagacccgccgtggcttcctacccgttcaccaccctgaagccccacgtcgggatcgtccactacgaaggccacctacaaatagcaggtagaacttccagaattctcccaaaggttagatttaaatgatgtaattcagaaaagtaatgatgtaactcttaaatttagctttctgtttaaaatgtagcattgttggccaggcgtggtggctcacacctgtaaccccagcactttgggaggccgaggcaggcggatcacgaggtcaggagatcgacaccatcctggctaacatggtgaaaccccgtctctactaaaaatacaaaaaaattagctgggtgtggtggcgggcacctgtagtcccagctacttgggaggctgaggatggagaatggcatgaacccagaaggcaaagcttgcagtgagccgagatcatgccactgcactccagcctgggcgacagagcgaaactccatctcaaaaaaaaaaaaaaaaaagtagcattgtttttcctaatgtaaacaacttttttttttttttttttgagacggagtctcactctgtcaccctggctggagtgcagtggtgcgatctcagctcactgcaacctccacctcccatatttaagtgattctcctgcctcagcctcccaagtagctgggattacaggcgtgcgccaccacgcccagttaatttttttgtatttttagtagagacggggtttcaccatgttggccaggctggtctcgaactcctgatctcaagtgatctgccccccgccccaccttggtctcccaaagtgttgggattacaggcgtgagctactgcacccggccctaatttaaacaattttcatcagcctgttctctatgaaaatcaggttcccaccccatcccctaggaatctgtcagttacagttcagaaacctgcattgaaattccagccgaggacagtatttcttcccactctatttgtcccctctcatctgtggaagctcagcagcatcacaacacgtgacttaaaagctttccttgtgccgtttgagagaataaaactttttcccagaagacaatacacccattaaaaatagtaagcctgctggtaaggttatttggatggcactttatatctgcagagtactctacatgtaaatttctatcagtaatcaaatgattagtagagtacaggcagccattttcctcttttttgaatcctattagaagcagaaagagaaggtatgaaatgtactctactagatagatccatcgccatgctggtctcccaaacatctccaagcattgaattcctcaggtgtcagttggcccagtgaatcacccaggtgctaaatcaaatggcttcagttcaaggcgttccttgaaaggaaagtgttagaactcaggaaatccgccttcgcagtgggctccaggccttctctcccaggctcgaggtggaaggcgctcttgggtgctgggtgtgccaagtggtcacctcgtgtgcccctgtcttccctgcagtggccgacatccccggcatcatacgaggcgcccaccagaacaggggtctggggtccgccttcctcaggcacatcgagcgctgccgctttctcttgttcgtggtggatctttctcagcctgagccgtggactcaagttgacgatttaaaatatgaactggagatgtatgaaaagggcctgtctgcgaggccccacgcaatcgtcgcaaacaagattgacctccctgaagcccaagccaatctgtcccagctccgggatcacttgggacaggaggtcatcgtgctgtcggcgttgaccggcgagaacctggagcagctgctgttgcacctgaaggtgctgtatgacgcctacgcggaggccgagctgggccagggccgccagccgctcaggtggtagccacgccagagcggggtcgcctctgggcctctgtctgagcaaacctgggtgtgaattcggtggttttgaatgcataaagtgccttgtggacacgggggagttgtggtgcttctgggtctctgggccccgcctgctggcctgagatgccctcatgttgggaagcattccgtgccccctaccccgcctgccctccgtatttcctgcacctgtcagcctgcaccgactgatgagccagttgctcatttgtgctgattaacacccctaataaggggttggggtgcccataacggggtggccctgccgctgactcaggtctccgccatgcacgcgtggactctcggatgagctcagcagaaccgcacagccagagccccaggtcagaagtgcagaccagggttctcagcacagtgcccgtcgtgcttccatggcttgctacggagagagacctctggatccacactggggctgcgtctggcccgttgtccagcagccctgcggtaccgcaagcccaggcaccagtgtctcggggggcctcactgctgcgcaaggggtggggccgaggatgcaagtccaggcagagcggcgcaggcagctgtgagcttttctccatcagccgtctgagaagagcagtgaggctagctgcttcctgtccttcagaacacttctctgtgctcagtgggagccaggaagcctcaggcttcacgactgaatgcacccaatatccgacctggctgcgtgtttctggctgggctgccgtgtgcacagcaagttaactagaggggctgtgggccatggaactgtcagcgttattctcagaaggcggccatggcatgggcagggtatagtgaggagtggaaggagacgtgtgcctggtaatatggggcggaatttccactcagctccatttgctggggatttaaagagaacccttgtgctacgccaggcagttaccgagccgaagggagatgatgggccttcgcccctcagtgggatggcagctgagggggccctgcatttgaccgtcgagactgcagcagcgcctttcctgtctgtggtttaagtctttgcagtcaagtactgatgcatccaagccaggcccatgcctggtgtctccctgactgcagaggagccccagggcaaggacagctcagctgctggcagcctgcctggcccatagacatcccccaagtagtctcaggcctctgacatgtccctgaggggcccctaagaaagaaagtggaggggacactccagaggctgtcgtgggaggatcatgtgagcctgggaggtcaaggctgcagtgagccgtgattgcaccactgcactccagcctgagtgacagagcgagaccctgtctcaaaaaacaaacaaacaaacaaacaaaaacagaacattctgggcacggtggctcatgcctgtagtcccagcactttgggaggccgaggctggtggatcacaaggtcaggagattgagaccatcctggctaacacagtgaaaccccgtctctactaaaaatacaaaaaaattagccaggcgtggtggcggtcacctgtagtcccagctactcgggaggctgaagcaggagaatggcgtgaacctgggaggcggagcttgcagtgagccgagatcacaccactgcactccagcctgagcgacagagcaagactccatctcaaaaaaaaaaaaaaaagtggaggggacaaagaagcagagaaggatgatcagaaggggacccccagcccttggaggagagacggcagcctcaggtgagatgagccgcaagggtccggggccgcgtctctgcacgctggggtggggcgcgctttgcacagcaggccggtgcctgggctttcaggagcaattccgttttgatctcacatcaaatctgcagctagaacatgacagtccttttacccgaagctttattttaatgtcttataatttcaaaggtccttctatcctagaaaccagagatgggttttgcatctatttgctttttctttcaggccgccacaaaggattttgtggagtcgccccaggcctgacggcgttaattatccctggctttcatcttgatgctcttgcaggggaggctcaagatgccttgtggctcgacccctgcacggagcccccagcccagcctccccgtgggttgaaaccttgatctgggcctgactgtggctgctctggggacatgccctcgtcctttgctgaagctgaggctccagagggggagtcactgccacgaaggttgcccagaactttccttgctgcaaaaagccccaagacttctccctgccacacacacagcttttgccatcgcgttctaaaagctgacagctttctctccaacactgttctccctgagtagggtaaagctacacttggcttccccagtttcctgtttcctgcctagaaacaaatttttgtcagtctgcttttcaaatgggatatatgattcacataccataaaattcaccactttatataa

SEQ ID NO: 515 - DNA, 10770 bp, Homo sapiens
agcaggggccaagtgtgttcttctcattctatcggtgccacagccagggccgcggttgtgcagccgtgtggatcagctcagcccgtcctcacccagccgtgtgaggaggccgaggccacacaggtggatggccttcccttagagttactttccagagcctgggtgcttagccgctatgccccatgtttaatattcttgtgttccaatgtaacaactttaaaattacacaggataacactcttgataacattttaataaatgggtgtttttcttttcaagaaattttgacttgcacttcagatttcctttttaatattttcgttgagcggaaccttgctattccataagaggatgtgtccagtgttgtggaagatttcatgttttaaatcctttgtacagaaatcctgctcccaagtcacagataggctgacgggtcagagggcaagacgtgacccagggccgagagggtgagtgaccaggaaaatcggattcatcagttcacttgtttgtttcagaaacgtgcacaaagacctgctgcatgaggccctcgtcttcagtttctgtttcatgcccagcattaaaccaagtatctcattttgccaatttgacttctgtaggggccatggcacctgcaaggtgtttctcagcaagattgaggaccgtgtttcagggcgtggggcattgggctttgtccacatgggctggcctgaagcccagccggctactgccacagcgggcttctcccaggctgctctcggtcggccgtgcggacctcgccaagcatcaggaactcccggggaagaagctgctctctgagaaaaagctggtgagactcctggagttagagcagcttgcctgtctcctcctcagaaggcacagggtgtggtttcgggtcctcctctgggtctcatctctgttgatgttagttgatgatcttagtgatggggcacgtggagcttcttgaaaatgacagggtgaaacgcaggcctgcgtgctaaatcccacgctcagcaaatcccagcaggctgggagaggcgctgcgtgcttggaaagccgtgatacaggctgctcattttcccatgagcctgtgtattttacatgtatgttacatatatcctttcatatgtgtggctatttcttaatttaaaacaaatgcggaggctgggcacggtggctcatgcctgttatcccaacactttgggaggctaaggcaggcggatcacttgaggtcaggagttcgagaccagcctggccaacatggtgaaaccctgtctctactaaaaaaaaaaaaaaaacctttttaaattaataaataaataaaaataaaacaagtaggggggaatataccttccgttttatggttctttaagccttataagtttttcttgttctatttaccaaaacctcctatttaaagcatgaattgtctctaataaattcaagaaaatgcacgtttatgactcccttcgtttcctgctgaatggaggggctccagataagcattactgggacaaacagcacttccagtggaaaagccgctttggtgggatgtgtgctcaaatagctgaagcgttagcacaggcttgtctcctccccaggagagaaagtgagtcgaggttttgtcctccacgaagtgctcaccagtggggctttcctccctgtctggtggattttgcttgcgttggcgcatgacagcattacacattgaaatttggaaataacagttcgtggttttcccacatggtggtgccaaagaatcttagaatgtttgtgttttaaatttttaaatttttttttgtgtttaaatttttgtgtttaaaaattttaaatgttttaaaattttcttttaaaagaaaaaaaaactgcatttgaggagtattggatcggagtgcagaggcagcagccctgggtggctgtcaggggcagggcacgtctgtctgtgcacgtgggcagaagccaggtgtcctccccagcgtgtggtgaggttgcagcaccctgggctgcgggagctgaccctcctgtggtaggagctgttgtgtgttgaacagtaacctggttggttctctctcttcatccagattgcacctaccttagtgacctacagaacagctttcctagccgggcacagtggctcacgcctgtagtcccagcactttgggaggccgaggcgggtggatcacgaggtcaggagatcgagaccatcctggccaacacggtgaaaccccgtctctactaaaaatacaaaaaactagccgggcgcagtggcgggtgcctgtagtcccagctacttaggaggctgaggcaggagaatggcatgaacctgggaggcagagcttgcagtgagccgagatcccaccgttgcactccagcctgggcgacagagcgagactctgcctcaaaaaaaaccacaaaaaacaaaacagctttccctccagcgaggggctctgtttgcctcaccacattttttaaatgagccctgttttcatcaggccccagaaaatactctttcttcagagtcgaaagcctggtaattgtccaggaacgattctaacttcctatttctctatcgcatcctgggaaactagaactttctaagagtaaagatctatgatttcaggaatggtttttttgaatggaaagacacattatataaggaatatttcctaaacaagatgtgggttttttagcttagaaatgctgatttttgttgttggtttttaaatcagtctcacccagagtaagaaatgctgaatttttgaagtgtaggtccacacagaatacttacatctgcattgtggatttacctcagtctacaaatgcaactgacttgtggagactgttttttatcttcggaatttagaagtgattagcaatattagtgtcattaacctctaattttaataggctgttatagatagaagatgtacatctcaaatggatgcatggtgtcttgaaaggaccttggagtgttgagatgacgtgggatatttgtgttctctgtagaaaaggtactttgtggactatcggagagtgcttgtctgtggaggaaacggaggcgctggggcaagctgcttccacagtgagccccgcaaggagtttggaggccctgatggaggggacggaggcaacggtggacacgtcattctgagaggcaggtgccctggggcagtgcagcggggttgaggaggggccccgagactgcatgtgcatttgaactaaaaacctgatgtatgggcaggcacagtggcttatgcctgtgatcccagcacttggagaggctgaggcaggaggatcacttgagcccataagttcaagaccagcctggacaatatagcaagaccatgtcttttttgtttgtttgtttttttgtttttttttttttgcctcaaggtttgtggatctacaaaaaatttttgaaaaaattagccagacatggtagcgtgcacctgtggtcccagctactcaggaggattgctggatcccagaagttcaaggctgcagtgaatcgtgatcacaccactgcatattccagcatgggtgacagagcaataccctatctctaaaaaaaaaaaaagtaaaatttttaaaacccagctaggcgcagtggctcatgcctgtaatcccagaactttgggagaccgaggcgggtggatcgcttgaggtccggagttcgagaccagcctggccaacgtggtgaaatcctgtctcttaaaaaataataataataaccagatgtggtggcacacactgatagtcccagctacttggggctgaagcaggaggatggcttgagcccaggaggtcgaggttgcagtgagctccgattgtgctgctgcactccagcctggccaacagaggaagaccctatctcaaaaaaacaaaacaaaacaaacaaacaaaaaaaaccctgatgtatggatatcatttttataaattatatggatattcagccgggcgtggtggctcacacctgtaatcccagcactttgggagaccgaggcgggtggatcgcttaaggtcaggagttcgagaccagcctggccaacatggtgaaaccccgtctctacaaaaaatacaaaaaaaattagctgggcgtggtggtgggcacttgtaatcccagctactagggaggctgaggcaggagaattgcttgaatccaggaggcagaggttgcggtgagctgagatcgtgccattgcactctagcctcggcaacaagagtgaaactccgtctcaaaaaaataaaaacataaaacataaaaaaaaaattatatggatattcatagttaagtagcacacccaaaaaagcaactttgaggccaggcgcagtggctcatgcctataattccagcactttgggaggccaaggcgagtggatcacctgaggtcaggagttcaagaccagcctggccaatatggagaaaccccatctctactaaaaatagaaaaattagccaggcgtggtggcagatgcctgtaatcccagctatttgggaggctgaggcacgagaattgcttgagcccaggacacagatgttgcagtgagccaagatcatgccactgcactcctgcctggctgacagagcgagactctgtctaaaaaaaaaaagaaaaagcaactttgaacatgttttgttttgtttgtttaatttcaggagcacagagagtttcctgtcagggaagctgacatgtcggtcgcgtgaaagcacgaggcctgtgtggtgggttcggtgggtgccgctggctgctggttatattcacactcagcatagacgcatagcgagctgggagtgaagccttcacaacaaaagcatagaatacagctactgtaaaaaataagaaatttaaaaattttcagaaatgatagcactttttgaaggaaaataaggatttcatttttaaaaaatcactttgctggttttgtaacttctgctgcaccctcactccatgcttccatacctatttttaaggttcttaaactggacccagacacatcagcaataggccatggttgtcgtaacacaaagggactgagattcttgttcttgctttagttgaccagcaagtcaagtccctgtcgtcggtcctgtcgcggtaccagggtttcagtggagaagatggagggagtaaaaactgcttcgggcgcagtggcgccgtcctctacatccgggtgagccgagactgccggacctggccctgtccccgttgttctggatcatccagctcctgggggccaccgtgtgacccacggggcccctgtggcttgatgcccacagctaggaaacagcacaatggaaacggaggctggcagacagcgggaaagcagccccacccctcaaagcaaacccagacgggcatttgtaccagggtctcacaccatgtgcatgtctagtgaaaaagtcatgaaacgattctcttttaaaaagagggagcccacggcacggacgcttcctccgtctctgaccccatgagccgacctctgactgagggaggccactggcacccagcgggcctgcgtctccttcgcgagctgaattcactcgtctcttagatgttttttctggtgcttcagttcacactaacgttttagaaacactatttgaaaaagccctttgtgcagtcagaagggtgtgtacgcagccccgtgaaagccctggagcactgggaccttttccttgtgctccggagctgttggcagaggtgagtggggcgggcagctgcccggggcacagtccgctcttgtcttctttccttagcgcttgcttcaggaatgggttaaggcctcctttcctcactgctggtagagctcagctgatgagtgcctgctgttccccaggtccccgtgggcacgctggtgaaggagggaggcagagttgtggccgacctgtcttgcgtgggagatgagtacattgccgcgctgggcggggcaggagggaaaggcaaccgcttcttcctggccaacaacaaccgtgcccctgtgacctgtacccctggacagccaggacagcagcgagttctccacctggagctcaagacggtggcccacgccggaatggtaggtgtccccactgccaacagcatctgcacacactcagctctagaaaatccacttttctcaatggggatttgccagtggcctggaagagaacagctttgcgactcacctttttcccatcagtacactgctgacttggtcgtgagcatgagcccttgtgactcccccagccctgaaatcctccctccaatcccagttagttacagactctgcgctaacaaaggtgctgccgcgggccgtgccaccgtcttccctctttcccccaggtgggattccccaacgccgggaagtcctcactgctccgggccatttcaaacgccagacccgccgtggcttcctacccgttcaccaccctgaagccccacgtcgggatcgtccactacgaaggccacctacaaatagcaggtagaacttccagaattctcccaaaggttagatttaaatgatgtaattcagaaaagtaatgatgtaactcttaaatttagctttctgtttaaaatgtagcattgttggccaggcgtggtggctcacacctgtaaccccagcactttgggaggccgaggcaggcggatcacgaggtcaggagatcgacaccatcctggctaacatggtgaaaccccgtctctactaaaaatacaaaaaaattagctgggtgtggtggcgggcacctgtagtcccagctacttgggaggctgaggatggagaatggcatgaacccagaaggcaaagcttgcagtgagccgagatcatgccactgcactccagcctgggcgacagagcgaaactccatctcaaaaaaaaaaaaaaaaaagtagcattgtttttcctaatgtaaacaacttttttttttttttttttttgagacggagtctcactctgtcaccctggctggagtgcagtggtgcgatctcagctcactgcaacctccacctcccatatttaagtgattctcctgcctcagcctcccaagtagctgggattacaggcgtgcgccaccacgcccagttaatttttttgtatttttagtagagacggggtttcaccatgttggccaggctggtctcgaactcctgatctcaagtgatctgccccccgccccaccttggtctcccaaagtgttgggattacaggcgtgagctactgcacctggccctaatttaaacaattttcatcagcctgttctctatgaaaatcaggttcccaccccatcccctaggaatctgtcagttacagttcagaaacctgcattgaaattccagccgaggacagtatttcttcccactctatttgtcccctctcatctgtggaagctcagcagcatcacaacacgtgacttaaaagctttccttgtgccgtttgagagaataaaactttttcccagaagacaatacacccattaaaaatagtaagcctgctggtaaggttatttggatggcactttatatctgcagagtactctacatgtaaatttctatcagtaatcaaatgattagtagagtacaggcagccattttcctcttttttgaatcctattagaagcagaaagagaaggtatgaaatgtactctactagatagatccatcgccacgctggtctcccaaacatctccaagcattgaattcctcaggtgtcagttggcccagtgaatcacccaggtgctaaatcaaatggcttcagttcaaggcgttccttgaaaggaaagtgttagaactcaggaaatccgccttcgcagtgggctccaggccttctctcccaggctcgaggtggaaggcgctcttgggtgctgggtgtgccaagtggtcacctcgtgtgcccctgtcttccctgcagtggccgacatccccggcatcatacgaggcgcccaccagaacaggggtctggggtccgccttcctcaggcacatcgagcgctgccgctttctcttgttcgtggtggatctttctcagcctgagccgtggactcaagttgacgatttaaaatatgaactggagatgtatgaaaagggcctgtctgcgaggccccacgcaatcgtcgcaaacaagattgacctccctgaagcccaagccaatctgtcccagctccgggatcacttgggacaggaggtcatcgtgctgtcggcgttgaccggcgagaacctggagcagctgctgttgcacctgaaggtgctgtatgacgcctacgcggaggccgagctgggccagggccgccagccgctcaggtggtagccacgccagagcggggtcgcctctgggcctctgtctgagcaaacctgggtgtgaattcggtggttttgaatgcataaagtgccttgtggacacgggggagttgtggtgcttctgggtctctgggccccgcctgctggcctgagatgccctcatgttgggaagcattccgtgccccctaccccgcctgccctccgtatttcctgcacctgtcagcctgcaccgactgatgagccagttgctcatttgtgctgattaacacccctaataaggggttggggtgcccataacggggtggccctgccgctgactcaggtctccgccatgcacgcgtggactctcggatgagctcagcagaaccgcacagccagagccccaggtcagaagtgcagaccagggttctcagcacagtgcccgtcgtgcttccatggcttgctacggagagagacctctggatccacactggggctgcgtctggcccgttgtccagcagccctgcggtaccgcaagcccaggcaccagtgtctcggggggcctcactgctgcgcaaggggtggggccgaggatgcaagtccaggcagagcggcgcaggcagctgtgagcttttctccatcagccgtctgagaagagcagtgaggccagctgcttcctgtccttcagaacacttctctgtgctcagtgggagccaggaagcctcaggcttcacgactgaatgcacccaatatccgacctggctgcgtgtttctggctgggctgccgtgtgcacagcaagttaactagaggggctgtgggccatggaactgtcagcgttattctcagaaggcggccgtggcatgggcagggtatagtgaggagtggaaggagacgtgtgcctggtaatatggggcggaatttccactcagctccatttgctggggatttaaagagaacccttgtgctacgccaggcagttaccgagccgaagggagatgatgggccttcgcccctcagtgggatggcagctgagggggccctgcatttgaccgtcgagactgcagcagcgcctttcctgtctgtggtttaagtctttgcagtcaagtactgatgcatccaagccaggcccatgcctggtgtctccctgactgcagaggagccccagggcaaggacagctcagctgctggcagcctgcctggcccatagacatcccccaagtagtctcaggcctctgacatgtccctgaggggcccctaagaaagaaagtggaggggacactccagaggctgtcgtgggaggatcatgtgagcctgggaggtcaaggctgcagtgagccgtgattgcaccactgcactccagcctgagtgacagagcgagaccctgtctcaaaaaacaaacaaacaaacaaacaaaaacagaacattctgggcacggtggctcatgcctgtagtcccagcactttgggaggccgaggctggtggatcacaaggtcaggagattgagaccatcctggctaacacagtgaaaccccgtctctactaaaaatacaaaaaaattagccaggcgtggtggcggtcacctgtagtcccagctactcgggaggctgaagcaggagaatggcgtgaacctgggaggcggagcttgcagtgagccgagatcacaccactgcactccagcctgagcgacagagcaagactccatctcaaaaaaaaaaaaaaagtggaggggacaaagaagcagagaaggatgatcagaaggggacccccagcccttggaggagagacggcagcctcaggtgagatgagccgcaagggtccggggccgcgtctctgcacgctggggtggggcgcgctttgcacagcaggccggtgcctgggctttcaggagcaattccgttttgatctcacatcaaatctgcagctagaacatgacagtccttttacccgaagctttattttaatgtcttataatttcaaaggtccttctatcctagaaaccagagatgggttttgcatctatttgctttttctttcaggccgccacaaaggattttgtggagtcgccccaggcctgacggcgttaattatccctggctttcatcttgatgctcttgcaggggaggctcaagatgccttgtggctcgacccctgcacggagcccccagcccagcctccccgtgggttgaaaccttgatctgggcctgactgtggctgctctggggacatgccctcgtcctttgctgaagctgaggctccagagggggagtcactgccacgaaggttgcccagaactttccttgctgcaaaaagccccaagacttctccctgccacacacacagcttttgccatcgcgttctaaaagctgacagctttctctccaacactgttctccctgagtagggtaaagctacacttggcttccccagtttcctgtttcctgcctagaaacaaatttttgtcagtctgcttttcaaatgggatatatgattcacataccataaaattcaccactttatataa

SEQ ID NO: 516 - DNA, 1392 bp, Homo sapiens
gcggccgcacaggcacggctgcgggggcactggggaggaagtccgcagggatgcctttgcaccttgtccacaaatctaaaaccatctcaaaatcagctgtcctgtaaaatatatttacaggaagggtatcaaggggagggtgtcccatggagaggtggcccggcacgggaactcagccagtcggagaacagagacccgctaaagaatggggagctctgggagcaggcggggaggtggagctgagggcgggtcacagcaggtaggggttgagcagctccataaatatcttaaagtgcatggaggcccggtttcttataggcggagaatggagttaccaagaccacaagagaaaattagaatgaccccagagtgctgaattgggaatgaggacgtcctgtgcacagctggcctgctgcctcccacgtgtcagggctggctcgggagtcaggagaggctgaggaaccttccagcccaaggagctggacaaggtgtggcagctgcaggcagccgggatagggacgcagactttcctacagggagaggcactgctgagaccggggcccacgtgggaggggctgtcggtcatggccagtctcaatgacaccctggttctggaggggacaccattttctctaggaaacacacatggactgttctgggtgcagggaagtccagtcggcgactgactcttaagtgattcaggaggaagttctttgtactcttcttccagcttttctgtaactgtgattgcctcagaattaaagcagaatggccaaggaccccacagagatagtgacccccccaaaggaggtggcaccttttcagaggagtgaggctggggagagggaggcgtccgaggcactgcgagggaggaggcaggcagtgtcccctcgttgtgctcccgctctggccccgtgttgagttttcagccgtccactggggccccttctgtacacatcttttgtagtcaggatggggagcaccttgtaaggtccctcctgtgcgacctgctgaagactggggagctctgggagcaggcaggtatttgtgctcatggtgaagggagaggggctgtcctctcctggagggcagggtcaggacttcctcactgtgcccttggcacctgcaaggtagccggctgtcatgagcggcttgttgaatgagtgacagcttaaatgaggctttgagagtgacagtagctggcacttagagtctgcagctgtgccaaccctgtcgctccggggatatttccacccacactacacatcaggcaccaaatgtgtgggttttccacaccaacaattcgccagtcctctgcagacaccagccaggcatcctgtaattcagttcagtctgaccctgccgcggttatcagggaccccagcgttaggg

SEQ ID NO: 517 - DNA, 262 bp, Homo sapiens
caggatggtcccatcttgagatctttagttacatttgcacagaccccatttccaatagtgatattctgaggttctgtggatgtggatttgggggcacgttgtttgaccccaagcaatgtccctttccatctttttttttggcggcggtgggggcggtgcagagtcttgctctgtcatgcaggctggagtgcagtggcgcgattttggctcactgcaacctccacctcccaggttcaagcgattctcctgcctcagccttctg

SEQ ID NO: 518 - DNA, 262 bp, Homo sapiens
caggatggtcccatcttgagatctttagttacatttgcacagaccccatttccaatagtgatattctgaggttctgtggatgtggatttgggggcacgttgtttgaccccaagcaatgtccctttccatctttttttttggcggcggtgggggtggtgcagagtcttgctctgtcatgcaggctggagtgcagtggcgcgattttggctcactgcaacctccacctcccaggttcaagcgattctcctgcctcagccttctg

SEQ ID NO: 519 - DNA, 1392 bp, Homo sapiens
gcggccgcacaggcacggctgcgggggcactggggaggaagtccgcagggatgcctttgcaccttgtccacaaatctaaaaccatctcaaaatcagctgtcctgtaaaatatatttacaggaagggtatcaaggggagggtgtcccatggagaggtggcccggcacgggaactcagccagtcggagaacagagacccgctaaagaatggggagctctgggagcaggcggggaggtggagctgagggcgggtcacagcaggtaggggttgagcagctccataaatatcttaaagtgcatggaggcccggtttcttataggcggagaatggagttaccaagaccacaagagaaaattagaatgaccccagagtgctgaattgggaatgaggacgtcctgtgcacagctggcctgctgcctcccacgtgtcagggctggctcgggagtcaggagaggctgaggaaccttccagcccaaggagctggacaaggtgtggcagctgcaggcagccgggatagggacgcagactttcctacagggagaggcactgctgagaccggggcccacgtgggaggggctgtcggtcatggccagtctcaatgacaccctggttctggaggggacaccattttctctaggaaacacacatggactgttctgggtgcagggaagtccagtcggcgactgactcttaagtgattcaggaggaagttctttgtactcttcttccagcttttctgtaactgtgattgcctcagaattaaagcagaatggccaaggaccccacagagatagtgacccccccaaaggaggtggcaccttttcagaggagtgaggctggggagagggaggcgtccgaggcactgcgagggaggaggcaggcggtgtcccctcgttgtgctcccgctctggccccgtgttgagttttcagccgtccactggggccccttctgtacacatcttttgtagtcaggatggggagcaccttgtaaggtccctcctgtgcgacctgctgaagactggggagctctgggagcaggcaggtatttgtgctcatggtgaagggagaggggctgtcctctcctggagggcagggtcaggacttcctcactgtgcccttggcacctgcaaggtagccggctgtcatgagcggcttgttgaatgagtgacagcttaaatgaggctttgagagtgacagtagctggcacttagagtctgcagctgtgccaaccctgtcgctccggggatatttccacccacactacacatcaggcaccaaatgtgtgggttttccacaccaacaattcgccagtcctctgcagacaccagccaggcatcctgtaattcagttcagtctgaccctgccgcggttatcagggaccccagcgttaggg

SEQ ID NO: 520 - DNA, 647 bp, Homo sapiens
gcctacagcagctaggtgggcaatttcctttaaaagtggctgtgggcaggttaggtattgtgattggccagcaccccaaataatatgtggggacacacccttgagggactttttaaagctaaatgtggcaatgtggaaacacctttctctcttgatctctcttttcatttccatactcaaacctttcctatcttcaaatttattctatcagcatttgaatttcaagtaataagaccgtgacttgccagctatcagattttcagtgacttgaaactttgaagataagtactggtggggaatgctctttgttccattgctctggcctgtggccctatctttatacaagggtaaaatcaacacctagtcatgaaatggagcaagaggctgcaagtccggggttaccctgcctgggatagagaattagaacatgtgagattatttatatgtacagtgactaattaactcttgaggcagtgcagtccgtcttggatgcattcgagtcgtaactcactgcatatttgctggggtttctgttatgctgatgtaatattaattggtttttccaagccttcattgaaccagcagacagatgtggttccagttttggagacttatgatctaaatatcctaatgcagcatttctaatt

SEQ ID NO: 521 - DNA, 403 bp, Homo sapiens
aaaaccttctttttctttaggtactattagaccatggctctaatttcctaagtaagggaatattttatatataacagatattttgctgttattcaaagatgtgtaagactgtcagttcatacaacttgatatggagtgagtgtcataaattaattattcccactctctggtctaataacctacaaaattattaggaaagtcacttactagcgttttacctttactctcagtatttctttattccttttacttcttcttcagccttctccttttcagagctttcagagtttcttatggacaggaagacctagagaaagtatttccccttctccttgatgatagccagaatgaggacaagaaagtattggagagacttagatgattcagaatgtaaattaaccag

SEQ ID NO: 522 - DNA, 291 bp, Homo sapiens
tttgtttttatttaaatatatctctgattgaactgaatgttaatcctggttaaaatgagtgacaaaaatactagaagatgtgtgttaaaacatttataccaaatgaattaaggccatttccttcagttctacttatgtgctgaaaacaataatacctaaagaaaaaccttacggccgggtgtggtggctcacatctgtaatcccagcactttgggaggccgaggcgagcagatcatgaggtcaggagttcgagaccagcctgaccaacatggtgaaaccctgtctctacta

SEQ ID NO: 523 - DNA, 234 bp, Homo sapiens
gttggctttttcgttcccctagtgttacacttcctttccctattacatagggaaaaggtaatagggaattcctattccctattactactaacctgggttagaaaagcatatattaataaagatattaatgtaaaagtattttgtaaactttaatcactgtggattgtgatttttcatatgttctaaaattaagttattttattgcttattgctttctacttttggtattatatt

SEQ ID NO: 524 - DNA, 12541 bp, Homo sapiens
agagccacacacaagtgtcccagtaccggcaggatccctccctgatcatgcggtccatcgtccacatgaccgatgctgcgcgttctggggtcatgcctcctgcccagctcaccaccatcaaccagtctcagctcagcgcccagttggggttgaatttgggaggtgccagtatgcctcacacatctccttcacctccagcaagcaaatcagccactccctccccttccagctccatcaatgaagaggatgctgatgaagccaacagagtaagttagaactgccttagtgtgtaacctgccagagaatatgggattaccccatgctgtttgaatttcattcatggtgttatcttgtttgtcttcatggatttggagtagcatttaaatgtatgatggtttgttgtttttcttcactctttcatttattttctgtagaaagtatattggactggaaattgagagatctggcttctcctactatagctgtaaggcattggacatgttatttaattcttgtaggcccaatttttctaatctgcaaaaggaaggcttggactccctgctacaaatttccagaaattctagacattccagaaattctaaactgctctggttctaagttaatgtccatgtgagcaagtttcatccagtgtgttggtcaagctgctgccacatttgacagccttgcggcttcggtgatgtttatcgctgagttcattctcttcatcttacatttttgcctttgtcatgggaaatgtataatttgaaatgatacaaagtttgaaataaaaactgtgttccagtatgacttttccaaatgcttagaatgatgaaaaagagtactgtaatagtacataattactcattagtcacttattaattatgtgctgtatacctactctgtgcttggcattttgtttggttcttgtgatacaaagatttataagagaattactgctaatgagattcccctttggggatgaatagcaatgtttaaaactagctccagatgtgattagtgatataattgatgtatctggtgtgctgagattctaatcgattctgcttgggagagtgatttgaggaagactttactgagaaagtgatatttgaattaggtctaagaggatgaataaaagtttgtgaggcagaagacagaggccagcattttggttgggggctagtgaggaacagtggaagtacatgctatttatgggtatagtgaagttcgatatgggggaagagagaaatagaagttgaagaacgaaatggcttaaatgtggtggtctttcttctgttggtagctgagagctgattaattatttgcatcgaggaatggcataagtaatttatgctttagagagacaactttggctatatagagaatgccttataaagggagggaccaaagaaaaggaaattaattagaagactcttttgttatgtttcctttcatcaagggagggaatgaacagaaggtaccagattagcaggcattttaggagtgaaaatcataaagattttaaggatttggtgatccactggaatttgaagaagagacaaattgggttttagtttgagagccagaatggctatcagcaaatgagaggagcaacccacaaagagaggagtgttctcccccatggggaacatgagagtttgggatgttagagttgaatttgacgtgcttacattggagtctagaactcagtcatggggaactggaactatagattttgggaccatcagcacgtggatgagaagatgtgaaagtaatcaggacttctcagagagtattaaggagtaagtcaaggacagaaccctgagcatcatctatttctaagtagcaaaaggaagaagaggagctagagaagattaagagtgatgaggaacagagaagggaggttcaagtgatgctgcagaaattgaaggggtttcaagatgaagggtttattctataacatcatgttagcacccccattgggcccaggaatggtaaatacactgacagtcttctcacagtcacagaacttcagtccagaggattgagaagtaatggttaaagactcttgagggatatgatcagatggggttaggtaacagcttagccattacagttgagagggattcctttccctccaatcacacgtccgctgatcttcatacttgccactgtaccatactgaaattgtcatgtcttaaagaggacctcttatgggactcctagcttgctccattttaagcgagggtctaggttttgtgtaaaggcaatacagccaatgtatcttcattgaatcttagctgagaaaggaagattaaaactatcattgattatgtctctttggggtaaatctttttctccagctttctgtctcaacccttttaagtcaatgacacaaaaatttccttaggagaattaattctgaatttttgtttaaaatgtgagactccacatttcttgtttattcttaaaaaataataatgattagggcacatcatggttatccaagaaaggcgtcaaaggtggtcgacatttgaatattgttttacagagaatgaaattgaactcctcttatttggaaaaaaagctactctggaaagtaatagcaacttgccattggtcagggtattgtggcactaacagtgccagattttcttccaggagaagaatatagttgtttgactcaactagaaaaatatgtgtgtctgtatatagtttttcttgtttaaataatgtttttcattgaaggaaaacttggctccaggtgaagctctaactgaaaggcatctgactctcttggaaattcacattcattaagtagaattaaacaagtgtcacttattttgaaaatttagaaaaaagactatgggctctagagaattattgaatcaattgtgtgagttatgaaagatggcattttggaggagaagtgagatatgacttaaaaccatctgaagcttgtaaactactcagataaagtgtggatgctgttatcacttaaatagtgcaaacagtaggctcacctagaggtaggccagtggtttcttaacactttgagtgttcagagctctctaagaaaagttccttatccgtttcctccctaagaattttagtaaatggtaaaaatttagtgaaagttccaaatgaccctcatttagaaagtaaataatactctaggaaaatttgaattagaattcaagtcattaaaagcctatctgttagtaacttgaatctatcttggttgatcttgcccaaggctggctttgaaaacagattttgtcaaacattgcaggattcttgatgaagttaactgcaaaattatcttcgatattgtaatctaggggaataaaacaaggtttacaaatcatttccctgcttctctgataagtatgttaaatgatcagtgaacttagatggtggtagctggtgagtatggagcttagtcatctttaaattgggaaactatacccatatcagtttgtggttctgatctctcagagttcatatggtcaatgtgtgtgagtctctatggagtattcttgtgagcagggttacttgccataaataacaaacatcttctttttagtcttcttagtgatttttaagtatcaactattgctcttttttttacacgtttttaattttacggagagtatcaatttcccttttatctccacttaaagtagttttgacatttttacatttgctgttaatcttcagaaaattatttttagaaaataaagatgaccttttcctaatgctgcaagtatagaaattggagctaacttccatttgaatttctggagagccattagcaaagtaacattctggtaaaattaaaaaatcagcctcaaaaaaaaaatcaattcagacagatcacacatatggcatgtgactatggctagggacctcatttaaaatatttgaatatgatcaacatcctgaatattatttaggttttacttctaaaacctctgaagatataaaatattttgctgatgtatgtatgtgtagtatagcatatatatagcattgcctggtacagagtgttctgtttttcattactcataattgctatttcgagcatatgttgtgaacgtattgaagatacttctgggtctcattaatcgatgttctaaatgctaatctctgctgtctagttaactccaagcaagtttacccctcccccgcttttggtggtgattcatctgttgatgatgcctaacaaaaccttcaaagaacaattatggatctgagttaagtcttgttgcattctctgcaagtacattctaggcagtgaattttcttcctgctttgcaggccattggagagaaaagagctgctccagactctggcaagaagcccaagactccaaagaaaaagaaaaagaaagatcccaatgagccacagaagccagtgtcagcatatgccctgtttttcagagacacacaggctgcaattaaaggtcaaaaccccaatgcaacctttggagaggtctcaaaaattgtagcatctatgtgggacagccttggagaagaacaaaagcaggtgagacaaagacccatcaaggctccatcaataaacctcatgatcatttaaaatattcctcacaccttttccaagtgcatgtgttcacttaatatgattgcttcttttgaaatccttttctaagcaatggaatttaaaaacccagacatataaatctaaacaactctccagttatattgatttctctgtcagcttatgggtgcatgttcagaacccattcagaggaaggttggaagaaatccaggcagtatcctgcaagcataaacttttgatgataatcttttcattttaaataatgtggaattttttcccctttgttcaaaaagggcactacaaagggattaggtccatcctgcttgcctttccattgatcatctttctgaacccttgtgctgtcctggtgggtttccaaactttgaagctgcctctgcgtgtctcattattgtcaccgggcatttgaaattttattccaagttcattttaaagcaaggcagtatgagaggtattcagaaattagccatgcttgtgggagatacttccttaggggcttcgtctcctctccttccccttgcaactcctccacacaaatgaagggaagaatgggttccttgggggtcgatcccccccttactccttgcatgaaactccaattaccattaaaagaagttaacttttacatatccacagaagaatagatcaactcctatgagtgataaaatagaataattgttttcaagaatgaagagtggaaagtccttgattttgtttacaaatcatgaacttatttcaggaactcattcctagaagcttgttttgttgggaaggtgcaacattagaaatttcttgttagtttgcactgagtttattactgtagatagcagactgattttctgtcccagaaatataattctgagggactggaaaagtgctgcacctaacttttaaactctggagagaaagatgcatgttgactgaacacccagccatcagaccacttaggaaaaggagaagcccaaatcatgtttaatatgctggaattttatttatgtaactcagtggggtcactaatggaaatctcctagcttggatgatttctgacttttaattttgctccaaaagaaaaccaacattgaaatgctttgctcttttctcttctgtcttcatcattttacctgttgtttttatcctcttgtttggtatagtttagaaaggtatctgagggaaagaagacattgatggagaaactcattattttctctaaagtaagccatttgcagcaaagcttattcttcttgctaccttatttattgccttagcatgaggttttcagctgttctcaagaaaaagtgattctcaagtaatctgtattgcatccagaaatctttttcttatttgcaatagtaaatataaaaattgtgctccagtgagggtggcagggttctgttttgttttaatatccgtgtgtgtgtgtgtgtgtgtgtgtgtgtgtgtgtgtgtgtgcatgcgctaacatttaaaaatcaaagccaaggagaccaacctttttatgtgagttgtgtttatgtgacctaatttgtgcagcagctattttatagctgagaatttatacgctaaaggtggtgctaattgtggtcttttaataggtatataaaaggaaaacagaagctgccaaaaaagaatacctgaaggccctggcggcatacagggccagcctcgtttctaaggtaaacctgggcaggggcggccaggctccaaaatagtcacagcgtggaaaacagccctcaagcattgaaaacatacttgtagctcccctaaaagttgatggaaaggcatcttgaacaacttgtaaacttaggcgtttccattagagattacccaagtgatgatctgaaaatatgagttaatttaagcagctgagtctaagttgtttctgaaagatttccctgatctttatatatgtgtatgtagctatatacataaattttaaataggctcttatgctttcttctggtcagggattgggacctgtgctagtgtcctctgtttaaactgggaggtatgtttgtcaggcatttttggacatcatattataaattctcctgtggttatattactacaattggggggcattgcatttttgaccaaactgttccatatcatataaataaataaacctcatgatcatttaaaatgaaattatactccaagtactaaacaaaacctacatgtattatatagagagtatacagtggaccctggtgtgttataaaatatcccaatatcccaagcaaatgtcactctagcaaatgaatccaaaggaatatgagctaatacatgatattaacatttaattagctttttctcttgcctttctagattttagaggttttggaaaggataatttgatctaatatatttttgctctagacaaattttttctgacaagtagggatacaatttcattgtcactgttgctgtctcaagtacaacctagggtctcaaagccatttaaaaagggttcattcctttttttctcttttcacctgagttgcttcttctttatattatctgtattaagtatttgtatcaagatctaccatttgcagctgctcagaatcagatcaacagaggtcctcctctctttgctgacagctattaggacacttcccacttcattagatagataaaacatttatcaggtcaatagcaaaacctctttctcagactctggaagacacatactggaagatatactgatgttgtactcagacttgcacattggcagaaaacagctgactgtgtgggctgcagatgttaagaattaaagtatagttggttaactagatggagtgaagtgaatagagtaacagtgtgcatgtacttcttaagtgaatcatttattcattcatttatccagagcaggtataggtgattttgtgcattaaagcatgaataattgaccgtatatggatttaaaccaagatccggtatctcaaaaggcattcagggaatattaaccatgattgggctcatgaagcctgtgactgacttagaggggataacttaaaacttacacattgcatactagaatcaggattcagaaatacttccaggtagaattcaatgacaccaaaaaagagaaaaaaaatcaataggatagaatttagaaggaataaatttaaaatactagggtttggtttgtttgttttttaattcagtaaatgcactttgagaggatcctaaatctctattcaaagaactgtgaggcaactaatatagtcctttaggtataagtttagaataatttcagcctgaacccaaactgtgaagtagctgctaatatagtgatcgcacaggaagcagcattgaattgtacagtgattattagaccgcttctaaagaattggttctgttttggatcccacagtttaaagagagatgacaatcaattgatgtctctctagagcattgcctccacgatagtgaggactgaaaatcacatcatgttagaataactgaaagaatcagggaggcaaggacttggaggcatatgatcttagtcctcaaatataagggccgttatataagggaaatgaagtcgatctttgtgcccaagagaggagaactcatccaaggggtgagcttacagggagtgagagttcagccccagcatcagaaatatcaatagggttgcatcatatgcacatttaacttatgcctctgcacgcagagcctcagacctccccccttaagatacgactctgctatcacttttaatctttacaataaccaaagaaattcatggaagcttactattaagccataaaggaacaagaaggcaggcaaggaagaactctgtgcaatcatccacccatctccatttaccgttaaggcagcatcttaaaggcacaatagtgcaactgagctgcccaggtgttgaaatacagactttctttgtgtttttttctttaagacagcttgttaatttttaactactagagtatataagaattatgtacatgtttattgtgtgtattcaactttatgggtgatttaatggttttttgaagacaaatttgaatatttataggctgcttcttaccctaagaccttagaacatgacggttcaggaacatgcagccccactgagttttgtaatgtggagagctgcccactgaaggggagtgccttataatgatgacatgtgttcaaacagaaaacatcagagatggcttttcctacactggatgactctctatatgaggttacatctcagtttgtttccaacagcaggattttataaatcggagtcataaaaatttagaaatataaaattattgaagataatggatggctgtttgatgtctcctaggtgcccctacaacacacccccaaaaacatcctaatcaaatgaaaaatacaaggaaaaaatcgtctctggaatgaatcattccaatcactgttgcattagtggaagaatttctttttgtagaggcagtgaagtgtttttagtacaaaatgtaatagatagtttctctctatgttcagccctagatctgctgtttatcttttaacaggtgatttggtcccatgaagttgaacattttccccttatctatgactcctttgataaattctacaaatcttcaaaaatagttgatgaactaaaacatttctaaaattgtgaaaacttcaatttggtatctctgaggaaaccaataatggttttcttatacttgagtgaaccttgttataaataatcacacaacacagggctttcaagtattccagtggccattttctggtaatagtaactgttaactaataaaaatagctaatatttattgcttcctatggaccaggcgctttcctaaatgcttaacatgtgagttcatttaattctcacaacctctgcacaagaaaaataccatataacctggccaggggtagtggctcacgcctgtaatcacagcactttgggaggccgaggtgggcagatcacgaggtcaggagatcaagaccatcctggctaacatggtaaaaccctgtctctactaaaaaatacaaaaaaattagctgggtgtggtggtgggcacctgtagtgccagctacttgggaggctgaggcaggagaatggcacaaacccaggaggcagaggttgcagtgagctgagatcgcgccgctgcactccagcctgggtgacagagagagactccacctcaaaaaaaaaaaaaaaaaaaaaaaaagaaagaaagaaaaataccatataacccaatgttacagataaggaaacaggaacagatgagtaaattaacttgcccaatgtcacaaagttgttaagtcagagaactgcatttgaactcaggcagcctgtactctgttgtctttaaacatatggtactcaatggtaaagtcgttagtacagacttaaatgcagaagaattgttgctcttaaatatgtgtatcggttatcttttgccacaatagtgctgtgtaacaaccatccccaaagctcaatgatgtgatgtaagatgagcatttatcctcagagagtgccagttagctgactggttcttcagatctaggccaggattggtagaaccagctagtcttgcttttctgtctggggtcagcttgcatgttggagggggctggactcattcacattgatcacagttggctggctggcagtgaactgactcttgaggggggtaattgggccacatgtctgtcatcatgcacatggcaggggcaggcttgaagcctcgtcttggaactggagcagtatcactgtcatcacattctgttagccaaagcaaaggcacaagagcagcccagactcaaggaggtaggggatttgactccacctcagggaggagtgaaaaagtcacaagacaaagagtacacatacaggagggcatgaataatggtggccgttaaaaaaaatcaatttataatatctaaaaatgcttaaatattttaaatacttatgtgttgtaacagtctggaattttctcccccaaaatgcaggctgctgctgagtcagcagaagcccagaccatccgttctgttcagcagaccctggcgtcgaccaatctaacatcctctctccttctcaacactccactgtctcaacatggaacagtgtcagcatcacctcagactctccagcaatccctccctaggtcaatcgctcccaaacccttaaccatgagactccccatgaaccagattgtcacatcagtcaccattgcagccaacatgccctcgaacattggggctccactgataagctccatgggaacgaccatggttggctcagcaccctccacccaagtgagtccttcggtgcaaacccagcagcatcagatgcaattgcagcagcagcagcagcagcaacaacaacagatgcaacagatgcagcagcagcaactccagcagcaccaaatgcatcagcaaatccagcagcagatgcagcagcagcatttccagcaccacatgcagcagcacctgcagcagcagcagcagcatctccagcagcaaattaatcaacagcagctgcagcagcagctgcagcagcgcctccagctgcagcagctgcaacacatgcagcaccagtctcagccttctcctcggcagcactcccctgtcgcctctcagataacatcccccatccctgccatcgggagcccccagccagcctctcagcagcaccagtcgcaaatacagtctcagacacagactcaagtattatcgcaggtcagtattttctgaagacgcatatggcagacggatttgcgtataccaaggagagtggcataggagggaaaagcatatgtggctgaaacctgtaagttggtgttggttatgcagaaatgtgtaacagatcaaacggtcctctcaagtgtctattagataggcaataagaactgcagtgtagctgagtaacatcttttagctgactataaatcactttgtttttaaacaagaaaagctgtgctcttttatgtgatgccttttttatttattcaggctatacctacaatatgtgaatcaaactgtttaatgaatcctgggacatactgatgactataaactggcctctctgagtcatagaaaaatggccttatttctccagaagtgagtaaaccacacttccaggctatctgaactcctgaagccctaaaaataaaaagcacagttgtaactacctgaaatatgaagatccagtttcatacaaacatttgtatgacgtgaatagttgatggcatttttttgtcatgaaaaaaataatgtaaatcacagacttttgccaaagctcttattttttttcctaaatctctccagaaaaaaaatgcaagtgactaaattcaattattgactaatttccactttttatccatgacttctccaaatcaaaccacagtatatgttgtaacaatatctatgaccactgttagcccattatattcattccaattagaagaaatgtgaatactatattccgtgttttgagtgacaagtttcgaaaaataaaaacactgtatttttaaaagggaaatgcacttaaatgaaaacagttattacaaaagttaagatttaaaaagaaaaagcaagagtttttattatgatgtaataccagtagaatatttaaaaggcacaccacatctgaataatcaatgtaaatattttctttcaaagttgtaagttttcatatcatgtgctgtaaagttttcctaaatgaggctttaacgtaaacactggtgacataaaccattcattgctacgttgcttattgtgtttttatgctgttttatacttttttatgagttatgatagcagcaattaagttgtttgtattttgcttaactaaaacaaaaatgcttttatcttgctatagaataaacacatttcagtaaaaactgtggactgtattttgatgcaacaacaaagaaactgttcacttttcaaataaaatgatatgtcagatttc

SEQ ID NO: 525 - DNA, 12541 bp, Homo sapiens; identical to SEQ ID NO: 524

SEQ ID NO: 526 - DNA, 1069 bp, Homo sapiens
gataaaatgaaaattaaaaacagcaagtgtcaaccctgaccagaatcctaatctggaaagaatgagggtgtgcgtggtgcgctccacagctactatgtgcaagacattcaaaaataatggaatatggatccctcaaagttgttgtatttcagagattatttactgtatgttgtgggttatgaataatgaattcagctttcaatatttcataatcctctcctactctgtattatgtacaaatattgaacagcaagagattctaattataaatttatggatttcttgctgtagaaaaatttatgtctaaattgaagcttttcataagatgtattagttgacaggtatcagtgttcaaacagccttagaatgatgcctaattacatctacaagggagtgattgtattccacaaagaaatgatgtgctagcatcagatccttcagaagtagagctcgaatggtaaaagattttctgtgaattgaaactaacattacataacaataaccattttatattctgttgtgaaacctttagacagatgtcttcaaaattaattgctaaactacatgtgacagtaattgtgtattagttctgtaattgtcattttgaaaacccatgaagtattgcttggaaaaaaatgtcactagtgataagacttaattgcaagtgaagtctgttttcaactgtttgcagttagaagcaggtgttgtaacatctattaaatgattttataaatcttgggttttatcacatttgattaaatgctgctaagccactgatggtcaattccagaggaaaaaaaaagtttaatgactacagtttataaaattaatcaccaggcaaaactacatatttaaaatgtcaaaaggcttgaatcatgaaaagaattcctcaaccttgttaccaaattattgttttcaggattcacaaagcatgttatatatccatttatatttcagtttatacatatgactggtttctattcctgagacttaagtaagtacttggtgcgctttttcttttgttacaggtcagaaataaatcaggataatgaaaaatagacatgagaaa

SEQ ID NO: 527 - DNA, 228 bp, Homo sapiens
acaatagcaaagacttggaaccaacccaaatgtccaacaacaatagactggattaagaaaatgtggcacatatacactatggaatactatgcagccataaaaaatgaagagttcatgtcctttataggtacatggatgaaactggaaaccattgttctcagcaatctatcacaaggacaaaaaaccaaacaccgcatgttctcactcataggtgggaattgaacaatg

SEQ ID NO: 528 - DNA, 1069 bp, Homo sapiens; identical to SEQ ID NO: 526

SEQ ID NO: 529 - DNA, 228 bp, Homo sapiens; identical to SEQ ID NO: 527

SEQ ID NO: 530 - DNA, 377 bp, Homo sapiens
atttgctgaaaccggcagaaccatatatgaaattcatatatacttaggaaagctgaacatacttgcttttatagaggtttctaatgaatgaatgaatggaattgaggaaagaagcttaaaatgcctcatgctttttaaattttaccaatgtgctgcagagagctttcattgggaatgaagtgtaagcctcacctgacacactaagaaccacgtgaatttccaagaaggggaaaggtattcttgcctgagaaagccccggctaatgtgtcttccatctggaaagtctttgcaaagccagttgggatgtgccaagttcagttatatttgggtgctcttccgagagaacttcgcaggggattgggtcagctctttctagg

SEQ ID NO: 531 - DNA, 375 bp, Homo sapiens
ctgtcgggcaacgatgcccccagtcccaccagcatctggctgggtttgcagaatgggggcgcaaggccacccatgtgccgtgccggctccaggttgggatgggaaagggggactttctcctcggctcctgaagccttggggatttaaacactgtctggggagacatcccagccgtgtctcgcctgtttcaggacatagaagcacctggaattaatgggccaggcattttccttgatagcaggaggcaccgctgcttccctgaaaccatcctcagaggaaggagccaggctaagaatgctttgatgtgggccaggctgtttccgcacccagctctccgtctctcattagccgggtgagactaggaaagcaacctct

SEQ ID NO: 532 - DNA, 373 bp, Homo sapiens
agaaaagaaattcagtgtctgctaactgctgtcaattcagcaactgtttttttggggtttttttcctgccatgggaagtgcccagtgcctgcctttgggggctcccagtctgctgagaagctctgcatgttgcagagaggtggaagctccccgggagggatggacagatgctgggagagcccagagaatggggaggccagttctgctagatagatgatcaggaatttggggtgggacagggagaggccccagacctgaaggtgcatggccaatcaggttagagaagttgttgaaatacctatgcttagagaaggtaaaagaatgtatggtgtttatgaaggtctcaaatccatactatctcatttgaaattga

SEQ ID NO: 533 - DNA, 2066 bp, Homo sapiens
cgacgcaactacaaatggggcggagctttcggcactggagcagctaatttgcatataggaatgaggtgcggctcggcttccatgggcctaatttacagatagggcggtatttctgccccttaaccgaaagtgggatacagaggacgacggtgttaggcgcctgtgtaggagtaaaatgtgtttattttgcattcaacgagagctcctgcattgcagctattttgcatatgatttgcatcttacgaagaatttgtggcaaaaaaaagctgggcgtgcgccgtaggaacctcctgctgagacgcttccggtagcggcgcgtgacccgacaggtctttcacctacctacctcagctcccacaaacacgagaagttccagcaagttcgccacttccggttctcctggctatccaatagcatcgagaggagcatccccggaagtgaggcagcggaggacgacctttttccggttccggcctggcgagagtttgtgcggcgacatgaaactgcttacccacaatctgctgagctcgcatgtgcggggggtggggtccccgtggcttccccctgcgcctccaggtacccgccggcggcagtcttcccttttcgggcgggatggtgggccggggtccagtgcttgcctaaactcctccgccctgcaggccaccgaggtccgtatctgccctgtggaattcaaccccaacttcgtggcgcgtatgatacctaaagtggagtggtcggcgttcctggaggcggccgataacgtgaggatccttaccccgccccagcatatcccggggaatgcggggcgggcacacctcagccgggctgaggcgggagttcgggatgcccggagataattttggcctcttgcccacagttgcgtctgatccaggtgccgaaagggccggttgagggatatgaggagaatgaggagtttctgaggaccatgcaccacctgctgctggaggtgagaagcggcccatcacttgcttcccgggccacctgcctcccgcactgaggctgccagtgctcagctctgtccctccctgcccgcaggtggaagtgatagagggcaccctgcagtgcccggaatctggacgtatgttccccatcagccgcgggatccccaacatgctgctgagtgaagaggaaactgagagttgattgtgccaggcgccagtttttcttgttatgactgtgtatttttgttgatctataccctgtttccgaattctgccgtgtgtatccccaacccttgacccaatgacaccaaacacagtgtttttgagctcggtattatatatttttttctcattaaaggtttaaaaccaaaagcggtttctctttgcagcaaatatacattaaaatagagtctctgtacagtcaagggctctgggccctggcttgccccatgtccctgcgcctccctggccaaacccaaaaataaatatagtgttattgctctgcagggcatagaggcagtgctctcctaccccctgaggaggctcgttgggagctgatggggaagccctgggcaccccaggggtccaggggctggagtctgcttggagttattgcttcaagggggacactaatgcccaatgcaaatgatgagaggaggagcgaaggggcatgggcctttgctctccaagtcccactctgctttgaagagggggtaggattaagcagcagcaaaagcatcacccactgggagactctggcctccatccccttccctccctgagataggtttctgcctcccacgcatcccgtgcagccccctatggcttccgcaaggccccatacactctgggggcacgttatggcttgcaaggggcagcactgtgcccagagcctggacacacgttcccagcttctgacaccccctaggagggggaggagagggcgtggggcctgttcccaggggctgatggcattgtcctggacctgccagcaggctgtggcactgcccagaccccagctccgccccagccattgggtctgaccccatgctaggcaggtcctgccagaacccccaccagtcccaccccttgcactcagtccat

SEQ ID NO: 534 - DNA, 5997 bp, Homo sapiens
atgaggtgcggctcggattccatgggcctaatttacagatagggcggtatttctgccccttaaccgaaagtgggatacagaggacgacggtgttaggcgcctgtgtaggagtaaaatgtgtttattttgcattcaacgagagctcctgcattgcagctattttgcatatgatttgcatcttacgaagaatttgtggcaaaaaaaagctgggcgtgcgccgtaggaacctcctgctgagacgcttccggtagcggcgcgtgacccgacaggtctttcacctacctacctcagctcccacaaacacgagaagttccagcaagttcgccacttccggttctcctggctatccaatagcatcgagtggagcatccccggaagtgaggcagcggaggacgacctttttccggttccggcctggcgagagtttgtgcggcgacatgaaactgcttacccacaatctgctgagctcgcatgtgcggggggtggggtcccgtggcttccccctgcgcctccaggtacccgccggcggcagtcttcccttttcgggcgggatggtgggccggggtccagtgcttgcctaaactcctccgccctgcaggccaccgaggtccgtatctgccctgtggaattcaaccccaacttcgtggcgcgtatgatacctaaagtggagtggtcggcgttcctggaggcggccgataacgtgaggatccttaccccgccccagcatatcccggggaatgcggggcgggcacacctcagccgggctgaggcgggagttcgggatgcccggagataattttggcctcttgcccacagttgcgtctgatccaggtgccgaaagggccggttgagggatatgaggagaatgaggagtttctgaggaccatgcaccacctgctgctggaggtgagaagcggcccatcacttgcttcccgggccacctgcctcccgcactgaggctgccagtgctcagctctgtccctccctgcccgcaggtggaagtgatagagggcaccctgcagtgcccggaatctggacgtatgttccccatcagccgcgggatccccaacatgctgctgagtgaagaggaaactgagagttgattgtgccaggcgccagtttttcttgttatgactgtgtatttttgttgatctataccctgtttccgaattctgccgtgtgtatccccaacccttgacccaatgacaccaaacacagtgtttttgagctcggtattatatatttttttctcattaaaggtttaaaaccaaaagcggtttctctttgcagcaaatatacattaaaatagagtctctgtacagccaagggctctgggccctggcttgccccatgtccctgcgcctccctggccaaacccaaaaataaatatagtgttattgctctgcagggcatagaggcagtgctctcctaccccctgaggaggctcgttgggagctgatggggaagccctggccaccccaggggtccaggggctggagtctgcttggagttattgcttcaaggggggacactaatgcccaatgcaaatgatgagaggaggagcgaagggggcatgggcctttgctctccaagtcccactctgctttgaagagggggtaggattaagcagcagcaaaagcatcacccactgggagactctggcctccatccccttccctccctgagataggtttctgcctcccacgcatcccgtgcagccccctatggcttccgcaaggccccctacactctgggggcacgttatggcttgcaaggggcagcactgtgcccagagcctggacacacgttcccagcttctgacaccccctaggagggggaggagagggcgtggggcctgttcccaggggctgatggcattgccctggccctgccagcaggctgtggcactgcccagaccccagctccgccccagcccttggggctgaccccatgctaggcaggtcctgccagaacccccaccagtcccaccccttgcctcagtccatcatggcctcgagcatctccaagaacagcttgtgcatgggcaccttgccctccagcttcaccccatagaaatgggccagcactttgcccgctgtctggcggaggagcggtagcgtgagcagcagcctgcccgcccgccgccgctcagcaccccctccggggccagcccggccggcttcatactccagcagggcctcgtgcagagcttctcgcagctgctccacagcctcggcatcttcgatgtgcacagagtctgcaagaagagaggaatgtggtgttggcctgggctatctctggcaagggcactccccgtatcttgagcactgctggatggggcctaaggaagagccaaacgaggatttgttgattggctgactgagaggcaccactcattgctgcggctcgtgggccaggaccccaccctctctccctcaactgtggccaccttgtaccctccccaccttccctcccactaaatgacctttctgcattagtgtggcactagggctcaaaatcctgtgtgcagtttggagcctgcacttggcttgctttttgacttctagcaagtcattgttcttccctaagcctcagttttcgttatctgcaaaatggggctgtgctaccgtcactgagttaacctgaagaccttacggagacacctcacctgtcagtgcctgccccagactcacctgaattggcaagggccaaggcctttagtagaacatactcctctcgctccagccgcagggcctgcagccgccgcactagttgcagcagggcagcccccagttcccccaggccagctgcccgtgccccctcttcatccaggactaagtcctcagcgaaggccagctcatcctgcagtggcagtgagcgctgggccacacccagcaccagcacctccatccacacgctctgcagtactgacatctggtcagacagcgacagcgatgagaagcctagggggcagcggggagcgggcctggctgagcaaacgcaccagagccgggcccgttcagggcagccccgggtcacctgggccctttacctgggatgctcttggcccagctgatggtgaccacaatctctcggtcaaagaggtcacagagggtagccacggctgggaggtgcccatcagggcctgcggggtcaggcatggcatagagcttctcaggctcaaccaccagcagatgagacaccagtgcattcactggggctgctgtgacaattagaggacaagagtcaggagcactcgaatctgtcaggcctcaggggtcaagcatcttcccacagtggctccccctgtggccttcctcagtagcagctgtccagtgacttccctccagggaagagcgctaactgtctcccagggaaagcccgtgtgtttgtggacaggctgtgagtgttggaaaatcgtccctgttcccagttctactacttttcctgatgcaggaaaaggcagtttcacatgtcttggggaaatgagtgagtgaagagacgaaggggaaatacaggtcccagtgcccaaggtaactatgatgccacacataggcctccggtttcgtagccccaggtacccacagtgctctcacctgtcttccgggggcctccagcgactgccaggggcccagcagggaaggggcccgggaagggcagtgggtccacctccggccgccgcttgtacttctgccgcccaccccggacgcggtccaggcgcactccttgaattgtgggacagataggactgtgactgtggtgctgtgggcagggtggggcttgctctccagagctgtcctccccgagtccactcaccagaactcccaggcctcacccccacctggcccgggtccccgactcccccagccctcgcccagcccctgcccagcgctcaccctccttgagcatgcccacccgcaggcacttggtgaagcggcaggcctggcaggccttgcgtctccgcttggtgatctcacactcgttggaggccggacagctgtactcgatgctccctgccaggaagaggcagggctccagtggcggcctcccggggctgggaggggacccagctgacaggagagccctgactctccccgggcaagcacaggtctgggggtatggggaggaaagggagagcagggggccatgagcaggcagggaggggagtggctgctgggcgggggagccctgcctggatgagggaggagctggaccaggcagcggggctgcatctcagccccaagcctcatctctggaccacactgccctcatctgccgacatcaagggccacaaggacctctgcattgctaaatccagtggtcaattcttagtcctcatgttacttggcctaaaaggaggatctaaggctgttgatcacttcctgctcctagaaacactgaaacactttcttcttttgcttctaggacagcatacactctggttttcctcccaccgcaccagccactttgtggtttctgagcatcttcccaagctcttccatccagactgccagggctgtccttggagctcatctccaatcccatggcaatcttccccagccgtggggctctcacgtttctacctctagcctggacttgctgtgagctccagacccatctctccagctgcctccttgacatcctgcatgtctagaaggcatctcggaccgaacacagcctacgtggactccacgtgttcacttgcccaagaagaaacctaggcagaatctctggttcctctcacaccccacatccaagccaccgacacattctggtgggctttacctcctccaaggtccagaatccgcctcctgcccctggcaactacttccacccttgacctgatagtcactgtcacctcgcccctcgcttggctgtccctgcttgctccagtctgttctcgactcagcagccaagagggtcctattaagcctccattacatcctgtacctcctcttctcaaaaccctctggggatttcccttctctgagtccaagccaaagcgaacctacgtcctcctaggcctacgcccctgcttcttgcctccttttgacctctactccttgctctcgcctcctccatgttcctcaaacaggccctgcctggagctctagtcctgaagtccacacaggctccctcacctccctctgctcactgtcaccttgaagatcttccctggccaccctgtgataatgccaaatccctttgcagagtcctcctggcctctgagccctgcttctggtttctcttcagccctcagcacaacagaccacgctgcatatgcactcacctatcttgtttattacgcctcccccttcagtggcagctccaccggggcaggaactggccccagcactagcaacgaggcctggcacatggtgggtgctggcagccctcccggcctcacagggccccgcaacgaccaaatgacacagctagacagcaggcccgcagcacatttctcctcgcggtgcattttctcctaccccctatttgcgcttctgcactcagctcaagacaccacggccgggcacggtggctcacgcctgtaatcccagcactttgggagaccgaggtgggtggatcacctgaggtcagaagttcaagaccagcctggccaacatggtaaaaccccgtctctactaaaagtacaaaaattagctgggtgtggtggcaggcacctgtagtcccagctactcaggaggctgaggcaggagaatcgcttgaacccgggaggcagaggttgcagtgagccgagattgtgccactgcactccagcctgggtgacacagtgagactccatctcgaaaaaaaaaaattagccgggcatggtggtgcatgtctgtaatcccagctgctccggaggctgacgtgcagtgagaatcgctatgacccctgggaggcagaggctgcagtgagccaagatcgtgccattgcactccagcctgggcaacagagcgaaactctgtaccaaaaaaaaaaaaaaaaaaaaaaaag

SEQ ID NO: 535 - DNA, 6093 bp, Homo sapiens
ccgggacccacgcctcgtttgcactgggtgctggacagccgacgcaactacaaatggggcggagctttcggcactggagcagctaatttgcatataggaatgaggtgcggctcggcttccatgggcctaatttacagatagggcggtatttctgccccttaaccgaaagtgggatacagaggacgacggtgttaggcgcctgtgtaggagtaaaatgtgtttattttgcattcaacgagagctcctgcattgcagctattttgcatatgatttgcatcttacgaagaatttgtggcaaaaaaaagctgggcgtgcgccgtaggaacctcctgctgagacgcttccggtagcggcgcgtgacccgacaggtctttcacctacctacctcagctcccacaaacacgagaagttccagcaagttcgccacttccggttctcctggctatccaatagcatcgagtggagcatccccggaagtgaggcagcggaggacgacctttttccggttccggcctggcgagagtttgtgcggcgacatgaaactgcttacccacaatctgctgagctcgcatgtgcggggggtggggtcccgtggcttccccctgcgcctccaggtacccgccggcggcagtcttcccttttcgggcgggatggtgggccggggtccagtgcttgcctaaactcctccgccctgcaggccaccgaggtccgtatctgccctgtggaattcaaccccaacttcgtggcgcgtatgatacctaaagtggagtggtcggcgttcctggaggcggccgataacgtgaggatccttaccccgccccagcatatcccggggaatgcggggcgggcacacctcagccgggctgaggcgggagttcgggatgcccggagataattttggcctcttgcccacagttgcgtctgatccaggtgccgaaagggccggttgagggatatgaggagaatgaggagtttctgaggaccatgcaccacctgctgctggaggtgagaagcggcccatcacttgcttcccgggccacctgcctcccgcactgaggctgccagtgctcagctctgtccctccctgcccgcaggtggaagtgatagagggcaccctgcagtgcccggaatctggacgtatgttccccatcagccgcgggatccccaacatgctgctgagtgaagaggaaactgagagttgattgtgccaggcgccagtttttcttgttatgactgtgtatttttgttgatctataccctgtttccgaattctgccgtgtgtatccccaacccttgacccaatgacaccaaacacagtgtttttgagctcggtattatatatttttttctcattaaaggtttaaaaccaaaagcggtttctctttgcagcaaatatacattaaaatagagtctctgtacagccaagggctctgggccctggcttgccccatgtccctgcgcctccctggccaaacccaaaaataaatatagtgttattgctctgcagggcatagaggcagtgctctcctaccccctgaggaggctcgttgggagctgatggggaagccctggccaccccaggggtccaggggctggagtctgcttggagttattgcttcaaggggggacactaatgcccaatgcaaatgatgagaggaggagcgaagggggcatgggcctttgctctccaagtcccactctgctttgaagagggggtaggattaagcagcagcaaaagcatcacccactgggagactctggcctccatccccttccctccctgagataggtttctgcctcccacgcatcccgtgcagccccctatggcttccgcaaggccccctacactctgggggcacgttatggcttgcaaggggcagcactgtgcccagagcctggacacacgttcccagcttctgacaccccctaggagggggaggagagggcgtggggcctgttcccaggggctgatggcattgccctggccctgccagcaggctgtggcactgcccagaccccagctccgccccagcccttggggctgaccccatgctaggcaggtcctgccagaacccccaccagtcccaccccttgcctcagtccatcatggcctcgagcatctccaagaacagcttgtgcatgggcaccttgccctccagcttcaccccatagaaatgggccagcactttgcccgctgtctggcggaggagcggtagcgtgagcagcagcctgcccgcccgccgccgctcagcaccccctccggggccagcccggccggcttcatactccagcagggcctcgtgcagagcttctcgcagctgctccacagcctcggcatcttcgatgtgcacagagtctgcaagaagagaggaatgtggtgttggcctgggctatctctggcaagggcactccccgtatcttgagcactgctggatggggcctaaggaagagccaaacgaggatttgttgattggctgactgagaggcaccactcattgctgcggctcgtgggccaggaccccaccctctctccctcaactgtggccaccttgtaccctccccaccttccctcccactaaatgacctttctgcattagtgtggcactagggctcaaaatcctgtgtgcagtttggagcctgcacttggcttgctttttgacttctagcaagtcattgttcttccctaagcctcagttttcgttatctgcaaaatggggctgtgctaccgtcactgagttaacctgaagaccttacggagacacctcacctgtcagtgcctgccccagactcacctgaattggcaagggccaaggcctttagtagaacatactcctctcgctccagccgcagggcctgcagccgccgcactagttgcagcagggcagcccccagttcccccaggccagctgcccgtgccccctcttcatccaggactaagtcctcagcgaaggccagctcatcctgcagtggcagtgagcgctgggccacacccagcaccagcacctccatccacacgctctgcagtactgacatctggtcagacagcgacagcgatgagaagcctagggggcagcggggagcgggcctggctgagcaaacgcaccagagccgggcccgttcagggcagccccgggtcacctgggccctttacctgggatgctcttggcccagctgatggtgaccacaatctctcggtcaaagaggtcacagagggtagccacggctgggaggtgcccatcagggcctgcggggtcaggcatggcatagagcttctcaggctcaaccaccagcagatgagacaccagtgcattcactggggctgctgtgacaattagaggacaagagtcaggagcactcgaatctgtcaggcctcaggggtcaagcatcttcccacagtggctccccctgtggccttcctcagtagcagctgtccagtgacttccctccagggaagagcgctaactgtctcccagggaaagcccgtgtgtttgtggacaggctgtgagtgttggaaaatcgtccctgttcccagttctactacttttcctgatgcaggaaaaggcagtttcacatgtcttggggaaatgagtgagtgaagagacgaaggggaaatacaggtcccagtgcccaaggtaactatgatgccacacataggcctccggtttcgtagccccaggtacccacagtgctctcacctgtcttccgggggcctccagcgactgccaggggcccagcagggaaggggcccgggaagggcagtgggtccacctccggccgccgcttgtacttctgccgcccaccccggacgcggtccaggcgcactccttgaattgtgggacagataggactgtgactgtggtgctgtgggcagggtggggcttgctctccagagctgtcctccccgagtccactcaccagaactcccaggcctcacccccacctggcccgggtccccgactcccccagccctcgcccagcccctgcccagcgctcaccctccttgagcatgcccacccgcaggcacttggtgaagcggcaggcctggcaggccttgcgtctccgcttggtgatctcacactcgttggaggccggacagctgtactcgatgctccctgccaggaagaggcagggctccagtggcggcctcccggggctgggaggggacccagctgacaggagagccctgactctccccgggcaagcacaggtctgggggtatggggaggaaagggagagcagggggccatgagcaggcagggaggggagtggctgctgggcgggggagccctgcctggatgagggaggagctggaccaggcagcggggctgcatctcagccccaagcctcatctctggaccacactgccctcatctgccgacatcaagggccacaaggacctctgcattgctaaatccagtggtcaattcttagtcctcatgttacttggcctaaaaggaggatctaaggctgttgatcacttcctgctcctagaaacactgaaacactttcttcttttgcttctaggacagcatacactctggttttcctcccaccgcaccagccactttgtggtttctgagcatcttcccaagctcttccatccagactgccagggctgtccttggagctcatctccaatcccatggcaatcttccccagccgtggggctctcacgtttctacctctagcctggacttgctgtgagctccagacccatctctccagctgcctccttgacatcctgcatgtctagaaggcatctcggaccgaacacagcctacgtggactccacgtgttcacttgcccaagaagaaacctaggcagaatctctggttcctctcacaccccacatccaagccaccgacacattctggtgggctttacctcctccaaggtccagaatccgcctcctgcccctggcaactacttccacccttgacctgatagtcactgtcacctcgcccctcgcttggctgtccctgcttgctccagtctgttctcgactcagcagccaagagggtcctattaagcctccattacatcctgtacctcctcttctcaaaaccctctggggatttcccttctctgagtccaagccaaagcgaacctacgtcctcctaggcctacgcccctgcttcttgcctccttttgacctctactccttgctctcgcctcctccatgttcctcaaacaggccctgcctggagctctagtcctgaagtccacacaggctccctcacctccctctgctcactgtcaccttgaagatcttccctggccaccctgtgataatgccaaatccctttgcagagtcctcctggcctctgagccctgcttctggtttctcttcagccctcagcacaacagaccacgctgcatatgcactcacctatcttgtttattacgcctcccccttcagtggcagctccaccggggcaggaactggccccagcactagcaacgaggcctggcacatggtgggtgctggcagccctcccggcctcacagggccccgcaacgaccaaatgacacagctagacagcaggcccgcagcacatttctcctcgcggtgcattttctcctaccccctatttgcgcttctgcactcagctcaagacaccacggccgggcacggtggctcacgcctgtaatcccagcactttgggagaccgaggtgggtggatcacctgaggtcagaagttcaagaccagcctggccaacatggtaaaaccccgtctctactaaaagtacaaaaattagctgggtgtggtggcaggcacctgtagtcccagctactcaggaggctgaggcaggagaatcgcttgaacccgggaggcagaggttgcagtgagccgagattgtgccactgcactccagcctgggtgacacagtgagactccatctcgaaaaaaaaaaattagccgggcatggtggtgcatgtctgtaatcccagctgctccggaggctgaggcaggagaatcgcttgaacccgggaggcagaggctgcagtgagccaagatcgtgccattgcactccagcctgggcaaccagagcgaaactctgtaccaaaaaaaaaaaaaaaaaaaaaaaaag

SEQ ID NO: 536 - DNA, 107 bp, Homo sapiens
gtaatcccagcactttgggaggccgaggcgggtggatcacgaggtcaggagatcgagaccatcctggctaacatggtgaaacccagtctctactaaaaataccaaaa

SEQ ID NO: 537 - DNA, 3736 bp, Homo sapiens
taaccaaggagatggccgcaaaccacaagtgtttattgcagaaatctggccaacattccaattgcagggccccagcacagggctgggcaggtgagatagggaggggtggaggaagtaatctggcccagggcctcagagctgtgagatgatattgggtgccaggctgcaggtgaggcctgtgccatctggttccacattcagggccttcactatgccatcctgtaccaccatggagaacctgccggaaagaggggcccagccagctgcatcagcctgggcttggaggctgggcatggagacaggcagtgaacagccaggggcccaagagaactccagagaggactccccccacagaggactctcccccacagaggactcaccaccacacaggactctctccacacagaggactctccccacagagaactctcccccacacaggactctctccccagaggactctcccctacagaagactctccccacacaggactctctcccacacaggactctctccacacagaggactctccccacagaggactctcccccacacaggactctcccccacagaggactctctccacagaggactctccccacacaggactctccccacagacgactctcccacacagaggactctcccccacagacgactcttcccacagaggaccctctccacagaggactctctcccacagaggactctctcccacagaggactctctccacagaggactctccacttttacctcttgagacgtcgattcccaaagatggacaccagcgaatcatctagtaataagtctgtctcctaagaagagacagagaaaagtgtcagaaatccttgaagaggccaagggcccccactgctccccgcactgccatgtccctgtggcggtcaggggaacactcaccttcccaaaggccccagtgggatcagccaggagccgaacctgcagagaaagtaaaggtcacaagaagaatatcctacctggtcctgactccctgcaggcccctcacctcaccttgccttccgccttgtgggctcggccccactcgccagtcacaaaggcatcattaacactcagacaggccaccacctggactcccttggccttcagagcctcagcctgctccacaaaccctggcaggtgtgtctgaggaaggggaacaaagggtcggcaaagggataactgcatctgacccccagcccaccctttatctccaggccctcctcagtgctctgcctcaacacctttgatcagacaatgagagctgtctaaaccattctatttcctttttgccttggccactaggaagctcagaatgaaacctaatgccttatggtccagacgtgaactttccatgggcagatctatgtcttatttatctgagtcccaagcaccttccacagtgcctgtcatttagcaggaccaacaggggtgttggatttaattgtagtatgtttttctccaacattcctggtactgttccctttttgcagtctctacttgttttcttttttttttttttcattttgagacggagtctcgctctttcacccaggctggactgcagaggcacgatctccactcactgcaacctacgcctcctgggttcaagcaattctctgcctcagcctccccaatacctgggattacaggcgcccgccaccatgtccggctgatttttttgcatttttagtagagacagggtttcaccatcttggccagactggttttgaactcctgacctcgtgatccacccgccttggcctcccaaagtgctgggattacaggcgtgagccaccgcgcccagctctacccagctctacttgttttgtgatggcactgaaatgctttttaggagtcctatcaggactatgtggaggacttaagagcaacacaaaagatcccaggtcctgatcttcagaaggggaagggcctcaccttggaacatccaggggtgaaggccccaggaactccaaacagcacacccttcttgcccttgaacagctctgccaggttcaccttgttccctggctccccttcaaacacctccactgctgggatggcatctcccacctagaaggaaggactccagggtaaggggggtgagggagccggggcaaaccagaggcaggaaggtgaacagagagcctggcagctgtgcctgcaggaaccggggctgaaacccagcaggatactccagccctgtcagtttccaagggccctccctgcccgctcccactgggttaccccatatcctccaagtttcaaggtggccctgctcctcttaaggggccattggtgacaacagagaaagggagggaaggtttccccatgtgtcgcaaagggttgcataacatgctgtctaggttacaggaaaggagtggaataaaatggacaggggctagagggctgtatttgggggtgaggaggagtccctgacaacatggagggagaggatcttggccaggtctgagggtcccaccctcaggaggaggaagaggaagggcagcggcaggtggaacgttgggggagggtgtccaggcccctacacccaggaggtgtagaacaaaagaaggaatcttttgaagggggaaggatccatccccagagtacttgagggcttcatgggaccagagtgggtagggagagagagtcagaggtgagggcctctgaggagcccaaaggttgagagcaggatgaagtagaaagggaatggggtctcacaaggtttgggaggagaagggggaaggtccaaggccctggggacggttccaggaagtgagtgaaagacagaaaggtgggaattcgccatggggggaggggaggtcatggagtgggatggggtaagcccccgcgggggcgctaagggacagctgtttcagaagataggggaaatcaggccgggagtggtgtctcacacctgtaatcctagcacttcgggaagccgaggcgggggggggcggggggggttcacctgaggtcaggagttcgagaccaatctgaacaacggggtgaaatcccgtctctactaaaaatacaatagctgggcgtggtggctcgcatctgtagtcccagctactcaggaggctgaggcagtagaatcgcttgaacccgggaggcggaggctgcagtgagcagagattgcgtcactgcactccagcctgggcgacacagaaagactccgtctcaaaaaaaaacaaaaaacaaaaaacacaatgcctcgggactgtcccgggaggtgaggcccccacgattggcgagaaaggtgggcagccacgagggccttctgaagggatgagccgggcgggcggaggggaggggtctggcaggcaggaaataaggcgatactctcagactagcgggacggggattgccatgggggtagtgggggatgtcaggcccggccgggccagcggtcaccttgattggggccatggctgcagcggctctgctgaaactgcggaccccgccagacgcccactctccttcactgcaccgtcttgctgccgctgccgcagactgaccgccggccccaccgacgagtatatagcccgctgagcgtctcagggcgcacacgccagctagtcccatacccgccccacggccacttccactccgcctcctggctggtgccaccgcagcaggcggggcaccgctagcggcacagcggcgacaccctgcggaaggcgggcctgggccgcctccactgcgcaggcgcg

SEQ ID NO: 538 - DNA, 400 bp, Homo sapiens
cctgaccgcaggtgatccacccacctcagcctcccaaagtgctgggattacaggcgtaagccacattgcctggcccgacttaatttttttagatcaatcaattttaacccccttctgttcttcctttacctgactacatgcttgaatctcaatccttaatctctctctgtccctgtccccaggattaagcagttttcagcagagtgtggcaatggacaggatccagcgtattgtaggtgttttgcagaagccacagatggggtaagtcccgctggttctttgcttgggtcttcataaaaaggagatttctccaatcctgttgctggttttttaaagcaacgtcattttcacagggaacgttacctaggaaccttgctacaggtagaagggatgttaaaga

SEQ ID NO: 539 - DNA, 2449 bp, Homo sapiens
ggtttccacaaatagctgcccagaagtcatcattgggtggtggcaagcatcagctgaccaaggtaagaacttaagaacacgaggaagaggtgggaaaatagccaagaaaatgaaatgtgcatgcagaaatggccccttttgccattttcttttgagtcttttcttcaagtttcttttcagggaaggaaattcctaaactttctgcattgtcttgattcctacatgttttgttgttgttgttgttgttgttgttttgtttgaatcactgggagaaactccatgaagtttaatcctatccctcatgccacagcttatctgctttctgcgtagatacaaaaggctttttacctggccaaatgattcatgcgggaatacacctcagcttctctctgcaaactcttttttccctactgcccccaaacccttcccttctccttcttttcatttctgcccacgtatccttgtgccaaaccctttgacagtttttgagtctacactgggtttcaaggactggtcataagaggtacctcactggaagtaggggaggggggcaccaatagcagcagtgttgatagattcttagacctggtatagaagtgacctattttcagccgggagcggtggctcacacctgtaatcccagcactttgagaggccaaggcgggtggatcatgaggtcaggagttcgagaccagcctggccaagatggtgaaaccccgtctttactaaaaatacaaaaatttgccaggcatggtggcgcacgcctgtagtctcagctactcgggaggctgaggcaggagaattgctcgaacccgggaggcagaggttgcggtgagccgagatcgtgccattgcactccagcctgggagacaagagtgaaactccatctaaaaaaaaaaaaaaaagtgacctattttctgtcctcaaataatagggtatgtagagggcattcaaatgacggagaaggagagtctcctgtagataatcaccagtcctaattttcaatcagccatggttattattgctgtgactaatctattaaaaaataagtaggccaggcacagtggctcactgtaatcttagcactttgggaggccaaagcaggaggattgcttgagcccaggagtttgagaccagcctgggcaacatggtgaaggctgctatctacaaaaaatacaaaaagtaggtgggcatggtggcgtgcacctgtagtcccagctgaggctgggtgggaggctgaggtgggaggatctcttgagcttgggaggtcgaggctgcagtaagccatgattgtgccagcctcgttgacagagtgagaccctgtctcaaatataaaattttaaaaaaacagtaggaggatcttgcctgaatattaatttacacttcttaaagaactcaagatagaatattcgaatttaaatacagaatttgggaaatgatgattccaattaaaaatagacttcaaagaaattctaaaagggattattttataaatagtgagaacctatggaactgtttgttttttcttcatctctggatatccagtgtctaatatagtatgtggtccatagtaggccatttatttgtttaataaatgaaagtataatttagttaccaaaacttttacttaatcatggcctggcaagatcatatctgttgcataaaacgaggtatgtttgcattgcaaactgagttcccaaggaatgcaaaggtttaagtaaccaggtggagctcatctgaatgctttctccacatttctttttttctcatttctcccctctctagcattttccaagccaccacagtgattcagctgcttcctctcctgcatctcctatggaaaagatggaccagacacagctaggacatctagctttaaaaccaaagcagccttggcacctcacacaatggccagctatgaacctcacctggatccacaccactccaatttgcaacccccctctcagctccccaggtactatctcctttagccatggtcctttaggcactggaaccggcattggcgtcattcttttcctccagcatggagtgcaacccttcacccactctgccccaaccaccccagtcccacctactacagcatctcctgtcatccctggtgagcctatgaaactatctggagagggtcctcgttgctacagtttgccagtaactctgccatcagactggagctataccctatcccctcccagtctacccaccttggccagaaagatgaccataggacaccgggagcagcagagaagccatcctccagttgctgctgatgctcatcttctcaacctctagcccagggcatacagctgtccactgtgacttctaatttgtgtaaatatttatgtatatatgtatttttactattaatgtgtgcatttgtgttgagggaagataaatcctttctgattaaagaaatttttttatacctaaa

SEQ ID NO: 540 - DNA, 400 bp, Homo sapiens
gtcttttgggacatgcatggattctctaacatggaagtttgcatcaaaagcaatggcctgggtgtaatgcttagcacatgttttccacgctcattatgtcagtgaattcatttttctccccaagacgttcagccagatgcttccacctcaggtttttgggttgcagctgttattgctggtgtttaaactaggatgccctacctccctcattccccagaaatagatgtggttaaaggaggagtgggtagggtagtctatttgtgacttttgctgaaagttttgcccaggtatgggagacgttggtgggaaagaagtaggtctggagtcaaaggtgaggtagatgccaacaggagttggcacagagccaggtttgagagtgggagccacactgggcaagggg

SEQ ID NO: 541 - DNA, 400 bp, Homo sapiens; identical to SEQ ID NO: 540

SEQ ID NO: 542 - DNA, 6245 bp, Homo sapiens
ttttttgtgcttttagtagagacgggttttcactgtgttagccaggatggtctcgatctcctgacctcgtgatccgcccgcctcagcctcccaaagtgctgggattacaggcgtgagccaccacgcccagccaaaagattctttttttttgaaaatatgcaagatgtaaatatttttcttttatttatttatttatttatttatttatttattattatactttaagttttagggtacatgtgcacattacgcaggttagttacatacgtatacatgtgccatgctggtgtgctgcacccactaactcgtcatttagcattaggtatatcgcccaatgctatccctcccccctccccccaccccacaacagtccccagagtgtgatgttccccttcctgtgtccatgtgatctcattgttcaattcccacctatgagtcagaatatgcggtatttggttttttgttcttgtgatagtttactgagaatgatggtttccaatttcatccatgtccctacaaaggacatgaactcatcattttttatggctacatagtattccatggtgtatatgtgccacattttcttaatccagtctatcattgttggacatttgggttggttccaagtctttgctattgtgaataatgccgcaataaacatacgtgtgcatgtgtctttatagcagcatgatttatagtcctttgggtatatacccagtaatgggatggctgggtcaaatggtatttctagttctagatccctgaggaatcgccacactgacttccacaatggttgaactagtttacagtcccaccaacagtgtaaaagtgttcgtatttctccacatcctctccaccacctgttctttcctgacttttcaatgatcgccattctaactggtgtgagatagtatctcattgtggttttgatttgcatttctctgatggccagtgatggtgagcattttttcatgtgttttttggctgcataaatgtcttcttttgagaagtgtctgttcatgtccttcgcccactttttgatggggttgtttgtttttttcttgtaaatttgtttgagttcattgtagattctggatattagccctttgtcagatgagtaggttgcaaaaattttctcccattttgtaggttgcctgttcactctgatggtagtttcttttgctgtgcagaagctctttagtttaattagatcccatttctcaattttgtcttttgttgccattgcttttggtgttttaaacatgaagtccttgcccatgcctatgtcctgaatggtaatgcctaggttttcttctagggtttttatggttttaggtctaacgtttaagtctttaatccatcttgaattgatttttgtataaggtgtaaggaagggatccagtttcagctttctacatatggctagccagttttcccagcaccatttattaaatagggaatcctttccccattgcttgtttttctcaggtttgtcaaagatcagatagttgtagatatgcggcgttatttctgagggctctgttctgttccattgatctatatctctgttttggtaccagtaccatgctgttttggttactgtagccttgtagtatagtttgaagtcaggtagtgtgatgcctccagctttgttcctttggcttaggattgacttggcaatgggggctcttttttggttccatatgaactttaaagtagttttttccaattctgtgaagaaaggcattggtagcttgatggggatggcactgaatctgtaaattaccttgggcagtatggccattttcacgatattgattcttcctacccatgagcatggaatgttcttccatttgtttgtatcctcttttatttccttgagcagtggtttgtagttctccttgaagaggtccttcacatcccttgtaagatggattcctaggtattttattctctttgaagcaattgtgaatgggagttcactcatgatttggctctctgtttgtctgttattggtgtataagaatgcttgtgatttttgcacattgattttgtgtcctgagactttgctgaagtcgcttatcagcttaaggagattttgggctgagacaatggggttttctagatatacaatcatgtcatctgcaaacagggacaatttgacttccttttttcctaattgaataccctttatttccttctcctgcctaattgccctggccagaacttccaacactatgttgaataggagtggtgagagagggcatccctgtcttgtgcccccctgtcttgtgcccgttttcaaagggaatgcttccagtttttgcccattcagtatgatattggctgtaggtttgtcatagatagctcttattattttgaaatatgtcccatcaatacctaatttattgagagtttttagcatgaaaggttgttgaattttatcaaaggccttttctgcatctattgagataatcatgtggtttttgtctttggctctgtttatatgctggattacatttattgatttgcgtatattgaaccagccttgcatcccagggatgaagcccacttgatcatggtggataagctttttgatgtgctgctggatttggtttgccagtattttattgaggatttttgcatcaatgttcatcaaggatattggtctaaaattctcttttttggttgtgtctctgcccggctttggtatcagaatgaagctggcctcataaaatgagttagggaggattccctctttttctatcaattggaatagtttcagaaggaatggtaccagttcctccttgtacctctggtagaattcggctgtgaatccatctggtcctggactccttttggttggtaagctactgattattgccacaatttcagatcctgttattggtctattcagagattcaacttcttcctggtttagtcttgggagagtgtatgtgtcaaggaatttatccatttcttctagattttctagtttatttgcatagaggtgtttgtagtattctctgatggtagtttgtatttctgtgggatcggtggtgatatcccctttatcattttttattgcatctatttgattcttctctctttttttctttattagtcttgttagcagtctatcaattttgttgatcctttcaataaaccagctcctggattcatcaattttttgaagggttttttgtgtctctatttccttcagttctgctctgattttagttatttcttgccttctgctagctttggaatgtgtttgctcttgcttttctagttcttttaattgtgatgttagggtgtcaattttagatctttcctgctttctcttgtgggcacttagtgctataaatttccctctacacactgctttgcatgcgtcccagagattctggtatgttgtgtctttgttctcattggtttcaaagaacatctttatttctgccttcatttcgttatgtacccagtagtcattcaggagcaggttgttcagtttccatgtagttgagtggttttgagtgagattcttaatcctgagttctagtttgattgcactgtggtctgagagatagtttgttataatttctgttcttttacatttgctgaggagagctttacttccaactatgtggtcaattttggaataggtgtggtgtggtgctgaaaaaaatgtatattctgttgatttggggtggagagttctgtagatgtctattaggtccgcttggtgcagagctgagttcaattcctgggtatccttgttgactttctgtctcgttgatctgtctaatgttgacagtggggtgttaaagtctcccattattaatgtgtgggagtctaagtctctttgcaggtcactcaggacttgctttatgaatctgggtgctcctgtattggatgcatatatatttaggatagttagctcttcttgttgaaatgatccctttaccattatgtaatggccttgtctcttttgatctttgttggtttaaagtctgttttatcagagactaggattgcaacccctgcctttttttgttttccatttgcttggtagatcttcctccatccttttattttgagcctatgtgtgtctctgcacatgagatgggtttcctgaatacagcacactgatgggtcttgactctttatccaatttgccagtctgtgtcttttagttggagcatttagtccatttacatgtaaagttaatagtgttatgtgtgaatttgatcctgtcattatgatgttagctggttattttgctcgttagttgatgcagtttcttcctagtctcgatggtctttacattttggcatgattttgcagcggctggtaccggttgttcctttccatgtttagcgcttccttcaggagctcttttagggcaggcctggtggtgacaaaatctctcagcatttgcttgtctgtaaagtattttctttctccttcacttctgaagcttagtttggctggatatgaaattctggattgaaaattcttttctttaagaatgttgaatattggcccccactctcttctggcttgtagggtttctgcagagagatccgctgttagtctgatgggcttccctttgagggtaacccgacctttctctctggctgcccttaacattttttccttcatttcaactttggtgaatctgacaattatgtgtcttggagttgctcttctccaggagtatctttgtgccgttctctgtatttcctgaatctgaacgttggcctgccttgctagattggggaagttctcctggataatatcctgcagagtgttttccaacttggttccattctccccatcactttcaggtacaccaatcagacgtagatttggtctcttcacatagtcccatatttcttggaggctttgctcgtttctttttattcttttttctctaaactttccttctcgcttcatttcattcatttcatcttccattgctgataccctttcttccagttgatcacgtcggctcctgaggcttctgcattcttcacgtagttctcgagccttggttttcagctccatcagctcctttaagcacttctctgtattggttattctagttatacattcttctaaatttttttcaaagttttcaacttctttgcctttggtttgaatgtcctcccgtagctcagagtaatttgatcgtctgaagccttcttctctcagctcgtcaaagtcattctctgtccagctttgttctgttgctggtgaggagctgcgttcctttggaggaggagaggcgctctgatttttagagtttccagtttttctgttctgttttttccccatctttgtggttttatctacttttggtctttgatgatggtgatgtacagatgggtttttggtgtggatgtcctttctgtttgttagttttccttctaacagacaggaccctcagctgcaggtctgttggagtaccctgcagtgtgaggtgtcagtgtgcccctgctggagggtgcctcccagttaggctgctcgggggtcaggggtcagggacccacttgaggagggagtctgcccattctcagatctccagctgcgtactgggagaaccactgctctcttcaaagctgtcagacagggacacttaagtctgcagaggttactgctgtctttttgtttgtctgtgccctgcccccagaggtggagcctacagaggcaggcaggcctccctgagctgtggtgggctccacccagttcgagcttccaggatgctttgtttacctaatcaagcctgggcaatggtaggcgcccctcccccagcctcgctgccaccttgcagtttgatctcagactgctgtgctagcaatcagcgagactccgtggggtaggaccctccgagccaggtgggggatataatctcgtggtgcgccattttttaagcccgtcggaaaagcgcagtattcgggtgggagtgacctgattttcccggtgctgtctgtcaccccttctttgattaggaaagggaactaactccctgactccttgcgcttcccaagtgaggcaatgcctcgccctgcttcggctggcgcagggtgcgcgcacccactgacctgcgcccactgtctggcactccctagtgagatgaacccggtacctcagatggaaatgcagaaatcacccgtcttctgtgtcgctcaggctgggagctgtagaccagagctgttcctattcggccatcttggctcctcccc

SEQ ID NO: 543 - DNA, 6871 bp, Homo sapiens
gcgccgagaccacactttcatggaggcggtgaaggcggaagcgtgggagggggccgcggtggcccaggacctgctggctctggggtaaaagggtgtgcggtgaggctggtgggtgcaggaaggccaggtctgccccctggacgcggacgaaaagggattcccagtgacatccccgccccctcccgctgcctcggtccccacaggtatggaggtgtcccgggggcggcgtcgcggggcgcctcatgcccagacttcagggggctgtgcgtgcggctggcggcggagctggcgacgctgggcgccctcgagcagcagcgagaggcgggcgcggaggtgctgagcgccggcgacggtaaacacggagcgggagggtggcaggggggccgccacggggccaccgagccctgacacccctgtcctcgcaggccctggcgcggaggaggactttctgcggcagctcggcagcctgctgcgggagctgcactgcccggatcgcgcgctctgcggcggggatggcgcggctgcgcttcgggaacccggtgccggactgcgcctgctgcgtgagtcccgggatgcagaagtggcaaggccatggcctccggagcggcgggctctgactttttaggggaaatcgaggttcccaaggggtgtggtcagaactttggggcggcccagagggtacgaggtgggtggggtgagcatgttggggcaagcagagcgctctaaaatgggcgggggtagaatttcgttttattttttatttattttattattattatttttgagatggagtttcactcttgttacccaagctggagtgcagtggcgtgatctcggctcactgcaacctccacctcccaggttcaagtgattctcttgcctcagcctcccgagtagctgggattacaggcgcgcgacaccacactcggctatttttagtagaaacggggtttcaccatgttagccaggcaggtctcgaactcctgaccccaggtgatctgtccacctcggcctcccaaagtgttgggattacaggcgtgagcccaccacgcccggcccggggttagaattttaattggagggcctaggagctcaagtgggttggattaggaggaaggcttgaggtttcaaagtgggcaggagtggaattcgtaggaggggacagggtctcaaggtggggcttactctggaaggctttaggtgggggggactagaaggtggaggattttgttttgttttgtttttaagtggaggtggggtctccctatgttgccctgtctggtcttcaactcctggcttcaagcgatcctcccacctcagcctcccaaggtgttgggattacaggctacaggcatgagccactgtgcctgggcaaaggtggaggttttaaagccggtggagcctcttttttttttgaaatggagtctcgccctgttgccaggctggagtacagtgacatgatctcagctcactgcaacctccaacttcctggttcaagcgattttcctgcttcagcctcccgagtagctgggattacaagcactcaccactatgtcctgctaatttttgtatttttagtagagacacagtttcaccatgttggccaggctggtctccatctcctgacctcgtgatccgcccgcctctgcctcccaaagtgctgggattacaggtgtgagccaccgcacccggccatcagtggagctttttgaccaagatggatgagtgggtagcagcctccctgagtgcacagcacccatttattactttcaggctttctctgctcagagctccaagccacccgcctcctgtgcctccgctctctgctggatccgagtcctaggccaccccttggtgaaggggtagtggagggagccggcatggtccaagaactggaccttaccctccaagccctggggctgcccagacctgcaccagggacccccgccagccagctgctgcaggagttgcatgctaaggtagagagtcagagtcccctcccgacctgggctaccccactttccttgtgggggtgggggtcctctctccacttctggaaggagtattccaaccactggcctgttttttctggagctgtgactggcattctcacatctgtggcctaggtcctcaggggtgtggggagctgagtttacagaggggcccatcctctctgccccagttggcctctgacttcttctcccatcagatctcagagctgcagccttctctgcccccagggtccctgcagcccctcctcagctgctcgctagatgcacccagatgggtaagactgtgtgcgactgactgaatgtgaactgtgtcctcatcagaggtggcagtgagagggacccctagcctgaccttgagaccttttctcccaggaagcgttggagtctctgtcccaaagcctcagagatcagtaccgctgccgccgctgcctcctcctcaagcgccttgacctcactacatctgctttccactggagtgaccgggcagaggtgtggtgggcaggggaccatgcagaattggagaggcccagttgtgggggctgcagttgcagggaggaggaatgagggccaggagtatcaccctcttgcaggttctcaggccatggacattttataattttttgaggtttggggctcctagaatctcagggtcccagggtattgttgaattcccagctctgagctggcagtatattcagaggcataccccatcattttttttttttttttgagacggggtctcactctgttgccaggctggagtgtggtggtgcgatctcagctcactgcaacctccgactcccgggttcaagtgattctcctgcctcagcctcctgagtagctgggattacgggcacatgccaccatgcccagctaatttttgtatttttagtagagacagggtttcaccatgttggctaggatggtctcgatctcctgaccttgtgatctgcctgtcttggcctcccaaagtgctaggattacaggcatgagccactgcacccagccttttttttttattttttattttttgagacggagttttgcttttgttggccacgctggagtgcaatggtgcgatcttggctcaccgcaacctccgcctcctgggttcaagtgattttcttgcctcagcctcccgagtagctgggatttcaggcatgcaccaccacgccgggctaattttgtattttttagtacagacagggtttctccatgttggttaggctggtctcaaactcccaacctcaggtgatctgcctgccttggccttccaaggttctgggattgcaggcatgagccaccacgcctggccaagtgtaccccatctttaagagatacgagcagagtcaggcacagtggctcatgcctgttatcccagcactttgggaggccaaggcaagaggatcacttgagctcagaagtttgagaccaccttgggcaacatagcaagacccccgtctctactaaaaattaaaaaaaaaaaaattagctgggcatggtggcgcatgcttgtccatctcagttactcaggaggctaaggtaggaggatcacttgagcccaggagattgaggctgcagtgagccaccatcacgccaccacactccaggctgggtgacagcgagaccctgtctcaaaaaataaatatttatttgagctgtgggcagtgaggtcttgaatggtaaagtaatgcttccaagatgacaggtcccacgtggggaagggctccagggtaccttctcttacctcctccccactccaggcccaaggagaggccatgagggcagtgctgatcccaattcgagaggttctgaccccagaatcggacatctccattgcacacgttctggctgcccgagccgacctgtcttgtctcgtcccagccaccagcgtggctgtccgcagagggacctgctgtgccatcaacaaggtgggcatctggggtagggaagggccctggcatccttggccttcagattggcctttcagcctctgctccagtccaagtttcagacttaccacctctaatccacccactagacatggcagctagaaggacctcgctcacacaaaaactgactgtggactccccagctcagaatgcttccgtggctccctaatgatctgaaaacaaagtctagctatttactgagtccctggctacttctccagcttgggcttaaaatccttccctatcaccaaacactacctatttgttgttttttaacctttttttttttcaagacagagtcttgctctgtcacccaggctgcaatgcagtggcttgatcttggctcactgcaacctccacctcccgggttcaagcgattctcctgcctcagcctaccgagtagctaggattacaggcacccaccaccatgtccggctaatttttgtatctttagtagtgacggggtttcaccatattggtcaggctggtcttgaactcctgaccttgtgatctacccgccgtggcctcctaaagtgctgggattacaggtgtgagaaaccgcacccttttaaccatttaaaaaaaaaaaacaaagacagaaataggccaggcacagtggctcacgcctgtaatcccagcactttgggaggccgaggcaggcggatcacgaggttaggagatcgagaccatcctggctaacacggtgaaaccccatctctactaaaaatacaaaaaaaaaattagccgggcgtggtggcagacacctgtagtcccagctactcaggaggctgaggcaggagaatggcgtgaacccaggaggcggagcttgcagtgagccaagatggcaccactgcactccagcctgggcgacagagcaagactctgtctcaaacaaacaaacaaacaaaaaacagaaataccctctgttttagtgattaggtatctagccgcatgcctctgtaagtagtcttatgtaaaatgagtattagggaataaagtctaacacagcaactattgaggcaaaatttaagttaagaaaaaaactgagcccgaggtgggtggatcacttgagcccaggagcagaggttgcagtgagccgggttctcgccactgagctccagcctgggcgacagagcctaggcgactctgtctcaaaaaaaaaaaaagaaaagaaaagtaggctgggtgcagtggctcacgcttgtaatcccagcactttgggaggccaaggtgggcggatcacaaggtcaagagatcgagaccatcctggctaacacggtgaaaccctgtctctactaaaaatataaaaaattagccaggcgtggtggcacgcacctgtagtcccagctacttgggaggctgaggcaggagaatctcttgaacccggtaggtggaggttgcagtgagctgagatcacaccactgcactccagcctgggcaacagagtgagactccgtctcaaaaaaaagaaaagaaaaaagaaagctcatgctagtatcttccaccagttcagtcccccctcccccagccactgtactcaaatagtcaacatctgctgtttcttcttcagcctcatgctgttcccttcgctctctggcccccttgtccaagatactttttttctctgcaactcaaatctcataaactctcaggtgcttatgggcaacgttccagaccgggggggccgcccaaatgagctggagcctcccatgcccacctggaggagccgaagagaggatggaggcccccagtgttggggtcgcaagaagaagaagaagaagtaaagggggactggtggtcgggggcggggggtcctccatgagatgctaatgctatcggtaatctctggggagtccgtttaaggctttccttggtatttggcacccaagccccccatctcctattcctgagtccccaaatgccctgctcccattcacgtcaataccaagaaccatgttctccagagaataaatttaatttatgacagctgtaggacctctctctgtgggggccaagtcaggggtgttggggtttgtgaaggggttgggggggtctctgctccctgggactgaatgggcccctgctgctcgaccctcaaagttctttgccctatagcacatctatcctgtgccgtgggcatgggtaaggagacattcaggcatcagacaagcatctgtcaggcgcctaccacctgccagccctgttctaggcactggggatgcagcagtgaatgacattgatagaaatccctgttctcctggagttgatgctcctgttgaggaaagacagacgttcaacgagataaagagggaaaaagtataggctgtcagagggagcacattctatgcagaaaaacaggagctgggcgtggtggctcacgcctgtattcccagcactttgggaggctgaggctggtggatcatgaggtcaggagtttgagaccatcttggccaacatggggaaaccccgtctctactaaaaatacaaaaattagccgggcatggtggcgcgtgcctgtaatcccagctacttgggaggctgaggcagaagaatcacttgaacccaggaggcggaagttgcagtgagctgagattgcatcattgcactccagcctgggtgacagagcaagactctgtctcaaaaaaaaaaagaaatggagatgtagggagttggtagaatgaggcctgagtctaaatgtatccaacacacagccgcacagatactaagtgcagggaaagggagcaggattagcatccaccaggatgcaaaagaggaaagtcacttccagggaaaaagatgacggacgtaccactaaaggcagtgtggatgggaaggcggatgcctctggaggcctacctctgggagccctgccagagtctgacggcaggactcaggactgactggggg

SEQ ID NO: 544 - DNA, 180 bp, Homo sapiens
agtagtaacagtggaaataggttccgtggtttaagagtatagagtctggaatttcatcttcaagccttggcatcaccatgaattcactctgtgacttatcttctctcaaccttagttttctcttctgtaaaagagataagatacttcgcccaatagtacacattaaatgctgtatatata

SEQ ID NO: 545 - DNA, 1391 bp, Homo sapiens
aagggagtgaggaagagaggagaccaagagatgtctaggaatccagcttggaggatgcagttgatggtgggtccatcaccgggcaggggacctggaaggaggaagggaggaagaaagatgacagatgatgtggggagcatatgatgtctaggagacgcttcactgccaggaacacttccctgcccagactggtaagtggatgaatgaacgtcccctgtggaatcctttttgtaacccaatctgagagtctctgccctcaaatagtggcgtttactccattaacccgtacagtagctcctgatatatttggccttattcttgctatcttattggctagaatccttttttctgttctcctagtggttattgtccccaccctacccccaacatgttgaaacttctatttttcttttttttttttttttgagacagggtcttgctctgtcacctaggctggtgtgcagtggcacaatctcagctcactacagcctctgcctcccgggctcaagtgattctcctgcctcagcctcccgtgtagctgggactacaggcacccgccatcacacttggctaatttttgtatttttagtagagatagggttttatcacgttggccaggctgatctcgaacttctgacctcaagtgatcctcccacctcagcctccccgaagtcctgggattacaagcatgagccaccacacccagcctatttttctatcaatattaaaaagtaaccagtatccataccctcctaccccagcagtcaaggacttctgcatatttgtactttctatgggtctccaaatctgtccagtcttccccacgccaatggcctgtgtcccctgtatccacttgggggtaggggcggtttctcctcaccgtatctgtttcccaggaagggtgtggggattcagtctgggtccaggcatggcgaagctggcacccagtctcaggctccagggatagcgtgtaggagtgattttcctcggagcctgtttgtgggtggatggaagggatgtgggtctgatgggaaggacctcttcttgaccttggactcaacccctttcccccaggccccttcccagcaccggtgtgctctaggtcttaccacagctggcatggggagctggtgtggatgggacaggagctccggggggtcctgcatcgcccttggcccctggcctcttcttacattctaccttcacctggtctctgcagtgtttgtggcaacacagcccgcactctgggggaaggcagcggcaggggtccgatctgtgtcatccattcttccagcctgcgggccaaggcttccctcccactcactgacaccccactcaccccgacagcggtagccttgcttggtgacaccccagagctgggaagagaaagg

SEQ ID NO: 546 - DNA, 4527 bp, Homo sapiens
acccggcggaccatgccaggactacggacccggacaggactgatggcctcagagaggcaagtattcaaggggcacttcacaaacagcttcctcaaaccccaccccctcccccgcactgcgctgctacttgcactgcggctcctggggggaagcaaagtaccggcagctgggtggtgaggggctttcttccagaaagaaacggagagcaagtggtcttcctccctagccgcggcgacccatgccaggtaaaaatcccagccgaggtccccggtcccgtcccctcctccaggtcaagggctcgggactggagaagcagccaactggagctgatattcgggaagctaagcctgaggctgctctggagggccggagaagcgagcggccaggcttggcacccgccaaatgtgccttgccaaaatgaagaggaaggaaggcgactccggagcccagcaggtgagcgctcctacgggatgctgggcaggctagaggtgtgggggcgtctggttccagtacctgcccggggcgacgcggaaacccagcttgcagtttgtttcgctcggtcccgcgcccagtaggagaaagacggccccacagcctcgcgggagccggctctcgcaacccagccgccccaagcccgccgtcgcccctcctcccgcgcttctcgcccctgattctagatgcagctgacttgttgcatgcagaagagcagctgggttcggcgttccaagcctctcctctttgctttgcctgccaccagatctgagcgccaggctggccagcacccagagagcccagagccgcaggaaaaaatgtgaaaagtaccaggagaccactgggtaatcgccccagtgcaaagggcctttcttcctacccaccgcaattgcagcaaataactccagggaggggaatcagaggcgccggggattgcgccctgggagagccctatctgctgaaagagagcgcctaatgccgttacttcccagtgtagcctttccactcggcagaccaagcgcctctccttcgagtcgctacccgcttggagtcggctcagaatcaggctgctaaaggtccctggagcccctcccccagcgaatccgagcctgcagcttcagcaccagaggctggacagcgccccggccctagggtgcccatggtcggtgcctgcgcacggctcggcctcccagcccacgccacttgcgctcgcggcccctcagaccccacgcggaggaggtcaggaggtgacacaggttcgcggaagaaagcgggactcatcttcctcatttctccagggatttaggtgtgggattctaggagagcattctctctcgctctggccacgaccagtggaaaaacttggcgccaaatttaggcagtggtgcggggagcagaggcacgattgcaggcggtgagcaaaggggcaagcgggacagaggatctactgtgagccccaggctctggtgttccgtgaaaaatcgccacatttaaatcctgcgctcccccgtgctccctctcgctctctcccccttcctttttcccttccttccttcctccccgcgctctctgtatgccttaataggagtgagtgaaagggaaagagtggggtggagggagaagatattgaagccgaggtaagaagcacattttatctaggtctcaaaactcaagcgtggatgaaatctgttcaaaaagaacatcaaggtacgcgtttttttacccaaaggagcccaaagtgacctttgtatgaggagcaaagattattgtttggccaagaaggggaaagatagcggagggagaggcgctatcacaaaagggctaacggaggtggagaaggaagggaaaggacttggcactagcatgcttaccaggcaaccagtcgcagcacctgcctcctgttgccttggttacggtgggtggcggggctttggccactgataatcagtgagcaccttgactatttaaaatatctcctggggagcccctgccttgtctgggctaggtgagaggcacatcgatcccgcgtaaggccccgtctggggaaatcctggaagatgtttgttttttgtttgtttgtttttattttaagtaaaggcgcatagcagagcaacttacctttccaccactacagtcatcccctcccccctccaccccatggcttcatttctccaggatttacaatttgggcttttatatttttcatttagtcctttatactgaaggagctgagttcctatccccaccctctctttttcccccttaaaatgagaaaaaaaaattgcttttcctggatgtacaggagggagacaaggaaattgtccaggggtgtctactgtagagagaaactttctccctggtttgatagtcatccctgccccactaaaccactcccctcaggggagagagggctgaattctggattacccccacttctcaccttgccccatagaccacatagaaagcacaggtagagggaaacgtgtctcccttagcagatggacactagcatcactctcatttgattcctcaagattctcttctcttcttcctccccagcatcgccttcataattagcaaatacagcacctaaagcttctaatcctctgagtttttctgtttcccttgattgacaaacattgactccactttcacctgtcagccttgccctgcctatgtccattagaaacatctgggtaggaaattattttactcataattttccaaaggcagctgtaacattctcagaatgatttgagaggaaatcgctagcaagttaccagaacagcctgtgctctgtgcactgtttcatctcaaataagtataagtgccatgaacgttctctttcccggaaaagcagcaacaagaacaacaacaaaaagaagtttgttttaaactgagatattacttgacaacacggggttggagaacatttctgtttcaggcaggaactgtgatatctttatctgtgatgccctgaaccataaacacacaggtcttttcttttctcctcttgttctcttcttttctctccatttccttcatttattattaatataagaatttttattcattataatttcagcataagtttaaaaggtcaaaaattcgctcggtgaactgacttgatagttttgcgggtatttacattaaaatgcttttaaaatgcttttctctcccatgttactatagaaacttccctttagaccagaccagacagctggtctgctttttgtacttttcttcccaaagaagtgctttcctttatgaattgtccggggcagctatcattgatcacatcagtaatgtcccatagcaacagttgtgtggttttttttaattattattcactttctgcttattttctttatggacaaagggtctactttcaagaagataactgagctcttattggctggaaaggaagaagcattctttcattggttggtgtgtattgccttgtcaaccaataagaggatgccatttatccttttctgactagctgagtgagcagggtacacagaaggattgaatctgccttagttccatccagtagcaaaggacagaactcagagtcctggactcaggatctggaattgactttggctaatccagattgcactgacttgcaaggatgacattttttacctacctattcgcagcttacttcaacatacctgccttatacattgtcctatggcttttttcccccttcattttaggagatactgtgatcatctttccaagtcagtgcaggttattgttaccagcacactgagggtccagagaattttgtgatttcccctaaaaatagataattggtcctcattattagagatttggtgaaaacttttggagatgaagatggaaagctagaagtcggaagaactgcattgcttgtgatgcagaatggatatctcagcttgtggattcactctactcagctctcagctttggtgttttgtgtttggtgtttggtgtcctcttcactttgatttttatttgtctgtttttccactttcattcttcagagctgcgcttttggcctgaattttcagtgacaaatagaaaagctgaatggatggagacaatgactctttaattcaatgtaagagctgactcatcgcttcccaggaagacttgttgcaggtaggtgatggttatcctggaactggagattatcccagtcctttgttgcactggcaatgggcaggtctgtttatttttctcttttttcctgcaccaaatagtcctactcagggatgctggcattggtccccacttccctaaaagaggggaagtcaaagttctttccctttcaggacagaaactctctgataacagcccggaagaagtcttaatgtgagtacagaccacttcagtcagtctttttttggttcttggcaggaggggatactgggaatggatagatgcctgatcatcacggtgctatcaagagccatattctttattggccccatctgtgccagagttcagcggtaccatgagccctagtgctagactattagcccttca

SEQ ID NO: 547 - DNA, 190 bp, Homo sapiens
ggaaacaagcgttgctaagggaacagctctaaattcagaggaaagaaattagaagtggggagtggaagttggtgggctcaagggcaggtcattttttcaaaatatatttctttgagactacagcagcctcttttattgcttgcatcttctcccaattcagatagagcccagaattaaagaattttgaaaa

SEQ ID NO: 548 - DNA, 193 bp, Homo sapiens
ctatactaaaaatacaaaaaattagccgggcgtggtggcgggcgcctgtagtcccagctactctggaggctgaggcaggagaatctcgtgaacccgggaggcggagcttgcaatgagccgagatcgcaccactgcactccagcctgggcgacagagtgagactccgtctcaaaaaaaaaaaaaaaaaaaagga

SEQ ID NO: 549 - DNA, 862 bp, Homo sapiens
tttttctctcattttattgcatccttggcttttgtcctcaaggttgcctcgtggcacaaaataattgccagagctccagccttcacctcctcattctgagggaaagtcagaggccagcgctggctaggtgtctcctggaagtcttcccaggaagcctcgaaacccttctttttatatcccactggccagaacagagcgaaatggccataccttgctgcaggggaggctgggaaatgtggctgtccagatggatgagattctgttacaggcataaggggagcggggggcttaggcagtgattctctaagtgtctccatccatttcacagatgaggaaacggaggccccaagagaggcagtgactcaccagggggcccacggccaggactgagcaccagagccaggattctcacctgaaccccataatctccatgctgctgatgtgcaagtctcagactctgcaaaatccactgcaccccctcgggctgtgaacatttcaaatccatgtgtgccaagcttggagcagcccagggccaggggcacggctggagagctggacccaggttcctggctgtggacccatggctgagggcttagctgctttgtgcctcagtttcctcatctgtaatatggggacacgaagtggccctgtctccaagggctctgacaagacacatgacttcatgtgaggcattccggggacccccacacaataggtcctcaatgtgtgttaatcgttctcatgctgctgctgctttttggggtgtaggcatgggtagtttctggggctcaaggaaataacagaggggtctccaaaggtctcctgtcttgcacaacccacaagtaaactctgatattcacta

SEQ ID NO: 550 - DNA, 386 bp, Homo sapiens
tgatccacctgcctcagcctcccaaagtgttaggattataggcgtgagccactgagcccggccagaacccgttttgcttttttctgagcctcggacactcttgggtgtttccacctcaggacctctgcacttgccatgtccctgcagctgtcatcctcctcagctctcccaaaaactgctgcttcttccccagggtctcagctcaaatagctcctcctcagggaagccctggcccacagctgctgaaattagtctctttctgttgtctccttcggaggcagcactgtgcttcagagcacagactctggagcccaccagcctgggttaaaatcccacctctgtcacttcctggctgtgtggctttgaggagtcccctaacctctctg

SEQ ID NO: 551 - DNA, 1780 bp, Homo sapiens
ttttttttttaaagagaggggtttgctctatcacccaggctggaatgcagtgttgtgatcatagctcattgcagcctcaaactcctgggctcaagtgatcctcctgactcagcatccagagtagctgggactgcaggcatgcaccaccacacctggttaatctttgtattttttatttttgtagagatggtgttttgctatattgcccaggctggtctcgaactcccaggctcaaacaattctaccacagccacccagtagctgggattacaggggtgtgccaccatgctccctcccacacacacaaaaataaagcaaggccggcgcagtggctcatgcctgtaatcccagcactttgggaggccacggtgggcagatcacgaggtcaggagttcaagaccagcctggccaacttggtgaaaccctgtctctactaaaaatacaaaaattagatgggcatggtgacgcatgccagtaatcccagctacttgggaggctgaagcgggagaatcgcttgaaccgggacccaggaggtggaggctgcagtgagctgagattgtgccactgccctccagtctgggctacagagcaagactccgtcccccacaaaaaaaaaaaaaaaaatacagaaaattagctggacatggtggtgggtgcctgtaatcccagctactcgggacgctgaggcaggagaatcacttaagccagggaggcggaggttgcagtgagccaagaccgcaccactcctctccagcctgggcacaaagcgagactccgtctcaaaaaataaataaataaaaataaataaaaaattgcaccctgggcacctcagcaacctcaccctaggctggtccctgctcttcctcctgatacctcaaacttgaaccttggaaatgataaggttccaacttgggaggcccggctgaaaaccgccccctcgtctgcactgcctggaaggggagctgagttaccgagcatcttcctatctcagccagaatcaggtgaggcgcagggcaaggctggtcctggggctgcagccaaaacctccagactccaggcacctgatatgggtttggcgtgcggctttcagagtgttccgggagctgggcagacctgccttaaggaacagtaatgcaaactcagtttcgttctttacaaacggaggtgatctcccctacccaacaagccataggcacaaggccccagtcgaaaagggtagaaatgtctccattaattccacaggcctcgcaaacacaagctctgtcagcattctggtatgttctagggtgtggacagtatctgtcaaagatgttctcttgcaagaggatcacctgaggccaggagttcaagaccagcctgggcaacatagggagactccagctctacaaaaaaattaaaaattagccaggcatggtggtgcacacctgtggtcccagctacttgagaggctgaggcaagaagatcagcagtgattgaaccactacgatccagcctgggcaacagagcaagaccctatctgtttaaaagaaaagtaggcagggcacagtggctcactcctataatcctagcactttgggaggccaaggcagtcggattgcttgaggctaggagttcaagaccagcctggccaacatggcaaaaccccatctctactaaaaatacaaaaattagctggtcatggccaggcgctgtggctcacacctgtaatcccaacactttgggaggctgaaccgggcagatcacttgaagtcgggagttcaagaccagcctggccaacaag

SEQ ID NO: 552 - DNA, 340 bp, Homo sapiens
cagctaagcccgtatttcattctgctcagatgctcagaactctagacatttgcctccgcaattatatcccattctcctggaggaccaggaccatgtcatattcattgctgaacactgcacagtgcttggtgtggggctggtgcctgtgagagtctgcacaatgtgtgaggcccgctggggcccacgaagggtgcaccaggttcccagcctcgctccatctcagaggtgtcctgctgtgtacggcggtggcccacggatgccgagagagcctgagcacgtgtcacacctgaaaacgctgctcctcctgggtccccgtgagcaccgggatggtgtcttcccc

SEQ ID NO: 553 - DNA, 702 bp, Homo sapiens
cagctaagcccgtatttcattctgctcagatgctcagaactctagacatttgcctccgcaattatatcccattctcctggaggaccaggaccatgtcatattcattgctgaacactgcacagtgcttggtgtggggctggtgcctgtgagagtctgcacaatgtgtgaggcccgctggggcccacgaagggtgcaccaggttcccagcctcgctccatctcagaggtgtcctgctgtgtacggcggtggcccacggatgccaagagagcctgagcacgtgtcacacctgaaaacgctgctcctcctgggtccccgtgagcaccgggatggtgtcttcccctctactttgctgccagcatgggggaaggagacctttctcgaatgccggggagttccaggctccctgctccatcctgaacacctctagaattcctccctcctctaccggcattggcctcagagggagaagacaagcaggtggccacagagcggtgggaagaaagctcctggattcattcaacaaacactctcaggttaggtgctcttcagagcaccctgcctggcactgtagagatgacaagaggaacaaggcgtgatcttccctcacaaggcgttcagagcaaggggcaggtacagggagtaggaatagagtacggaagtaggcagggtgggccagatgcggtggcacacgcctgtattccc

SEQ ID NO: 554 - DNA, 387 bp, Homo sapiens
gccaggagacagggacttggtgtctccgagctgaggcaagagggtgtttgcaaagggcaagagccagaggtcactgagcttccttgaaggaaaagcactgggtcagctgaaggggggagggaacagctggcttggaggctgcagccaggtgggcaggtgcccttcccgaggcgggacaggcagggagcatctgctgggccctggcccacccgctctggggctgacggcgttctctgcagcagtgacccgtcctgtaggagaggttggctcccggtggaactggagggcagtggtggccagaatcccttgaggagcggggcggccccggaaccacgccggctctgtgagtctggcccggcacaccacagcggtcttcctttttctctc

SEQ ID NO: 555 - DNA, 237 bp, Homo sapiens
tgggcggatcacctgaggtcaggagttcgagatcagcctgaccaatatagtgaaaccacatctctactaaaaatacaaaaattagccgggcgtagtggtgggcgtctgtaatcccagctactcaggaggctgaggcaggagaatcgcttgaacctgggaggcagaggttgcagcgagccaagatcatgccactgcattccagcctgggcgacagggtgagactcagtctcaaaaaaa

SEQ ID NO: 556 - DNA, 647 bp, Homo sapiens
ttacatgttaccttctttcaaagcttttcctgacccccttactactcaccctctactatccatcctggaagaactggcccctcttctctctgccctgtagacttagcatagactgctttcacagcacatatgttgtttcataatttcccatttttactcctatctccttccttttattattattgtatcataactacttgaggtcaggtcccttgcctctctcatctgtggttctcaactgccccaaagtttgagacatatgtcttgctttgtattatatttagagacttctccatagccacaagaatgtaaagtctttgaaggcaaggagtatggattttttttttttttttttttttttttttgagatggagtctcactctgtcgcccaggctggagtgcagtggtgcgatctcggctcactgcaagctccgcctcccgcgttcacgccattctcctgcctcagcttcctcagtagctgggaccacagacgtccgccaccacgcctggctaattttttgtatttttagtagagatggggtttcctcgtgttagccaggatgatctcgatctcctgacctcgtgatctgcccgcctcggcctcccaaagtgctgggattacaggcgtgagccgccgtgcccggcct

SEQ ID NO: 557 - DNA, 104 bp, Homo sapiens
atcccagcactttgggaggccaaggtgggtggatcacgaggtcaagagattgacaccatcctggccaacaaggtgaaaccctgtctctactaaaaatacaaaaa

SEQ ID NO: 558 - DNA, 450 bp, Homo sapiens
ggttggaagtgatggaaggatatgtttttccgggggtaggattaaactagtgcatggaagtcacagtgggtgtaatagattatttttggatatttttaggtagactgggatgaactagtagaggtgttttgtagtcttgggtggaaggtttgagatcccagattttgaggttcatgattggtaaaattgtggcggtgggtgattgggagaccatcataaggttgctggcattttattttgtcatgtaagggcattaaaaaaatctagccttcttttttgagacagggtcttgctctgttgcccaggcaggaaggcagtagcatgatcatggctcactgcagtctcaaccttctggactcaagcagtcctcccatctcagcctcctgagtagctgggaccacaggcatgagccaccatggccagctaatttttttttatttttatttttgt

SEQ ID NO: 559 - DNA, 256 bp, Homo sapiens
ccaggtacagtagctcacacctgtaatcccagcactttgggaggccaaggcaggaggattgcttgagaccagcctgggcaacatagcaagaccccatcgctaaaaaattagcttttttttgagacggagtcttgttctgtcacccaggctggagtgcagtggcgcaatcttggctcactgcaacctctgcctcccgggttcaagcgattctcctgcctcagactcccaagtagccaggattacaggcgcccgtcac

SEQ ID NO: 560 - DNA, 576 bp, Homo sapiens
tttggaaccggctacactgcgggatgccttagccgccttctctgagcccttgggagcaacagcagcaaccaggcctccagcattggcgccatctcctgagcgcccctgcacctgctttcttgctagctgccccctcacttggagtgaacagggaagtccctggagtgggtttgctagtgtctttgccactcttactccttttggattttgatttgccttccttcccttgaggacctggcactggggtcacaaacttgatgttgtctggtagtgtggccacagcattgggagccggtatccccacctcctttgagcctgacatttccagtttctgctggtccttttccagatcggcgtccaggtcaatgatgagattccctactccaatgtcccattcatccccactgtcgtatgtctcaaccgggtttgcatccactcctttccctccggaggctccactgctcaaggacatcttagagtcaacgtcccacctcaagattcaaggctcttccttgcccccagctttcctattttcagcttcagctatgttctcagacctgccacattggtcagtac

SEQ ID NO: 561 - DNA, 575 bp, Homo sapiens
tttggaaccggctacactgcgggatgccttagccgccttctctgagcccttgggagcaatagcagcaaccaggcctccagcattggcaccatctcctgagcgcccctgcacctctttcttgctagctgccccctcacttggagtgaacagggaagtccctggagtgggtttgctagtgtctttgccactcttactccttttggattttgatttgccttccttcccttgaggacctggcactggggtcacaaacttgatgttgtctggtagtgtggccacagcattgggagccggtatccccacctcctttgagcctgacatttccagtttctgctggtccttttccagatcggcgtccaggtcaatgatgagattccctactccaatgtcccattcatccccactgtcgtatgtctcaaccgggtttgcatccactcctttccctccggaggctccactgctcaaggacatcttagagtcaacgtcccacctcaagattcaaggctcttccttgcccccagctttcctattttcagcttcagctatgttctcagacctgccacattggtcagtac

SEQ ID NO: 562 - DNA, 575 bp, Homo sapiens; identical to SEQ ID NO: 561

SEQ ID NO: 563 - DNA, 2073 bp, Homo sapiens
tgagacaaggtctggctctattgcctaggctggagtccagtggtgccgtctcagctcaatgcaacctccacctcgcaggctcaagctatccttccacctcagcctccccagtagctgggattacgggtgcacaccaccaatgcccggctaatttttgtagagacagggtttcaccatgttgcctaggctggtctcaaactcctgagcttaagcaatctgcccacctaggcctcccaaagtgctgggattacaggcatgaatcaccaggcccagccagtaatttcaatattcaaatcttcctcattggctagtagtcaacactgctactctgcaccacagaattcagtcaagaaacttcccaaattttatgagttcttcctcttcatgacagttcccagttgagaggatgcaattcttagattatatcaaaacatctgttttgctattttggttctgtttgttatccctacatagaaacgtcccaaaccacaggcaagcccatttctcagagagaaaattttaaagaagttttcaaagactttgcttataaattatagtactaatcatcaaatactcactgagcacctattatgccccaaaccggagattgttgtttctcaaaaaccgctcctctgcatggttcctaacttcctttcctttaacttgcctcttctgctcctcccagtccagaaatgttctctccctgcacagcatgttttaatctcctagcaacttccaaacatttatttaaataattatttatttcaatagccaaaggtaatatggaaaggcaccctcaggaccagactgtccaaaagggttgagggaacaggggaaggaattgagaaagcaggttcttgcttatggttacatgaaactgtatagcaaattttctgcttctaaaagtaattgccagcaattttctctatctttcaaaaactgaagcacagtctctttcccttttctttctcattctgctgccccattctcagagtctccctgggaggcaaagcttatatggcaaagcaacattattaagggacaaaactccctggcaccaggatgtattcttagctgaacatactgcatctttcagcccaattataatctgaagggcagccacccaatcagtccctgcacctctatgtgagaaaatgggttccatttgcttctctgttagagacaatcatggacatttacacttaaatccaacataaagctaagcaatattaatcctttcatccacagactatcactgggcttagaaggttgcaacataagtactctaaaatttagataggagaatgaaggtcatcctcagaagtactttttagcacaggaagaataatgattatgaatatggatatatggcaagagtttcttgaagccagatgtagggaacagtctaatgggcctggaacagaagcaacaactgctagtactcctaagcctctttaaaacagtattatccatctctacccgcagagaaaatagcaaatcaccgccagcacaggatgagccaagctagtacccagctggaacctgactctgctgaagtggactatagcatctgccacctaaacacaggcagcctctctggcagctgccactggtaaaagggaatgagccactgtattattagtggaagaaactcacagacctgctactggagaagcccagatgttgctaagagctacagatgtgccagaggcaaagaccaaaataccgacagcaaagaaagcatgagctaccactggaatacaggcactaagagggcaccaccacccaaacatacacatccagcctttatttattaacacttacatatggaaataggtattccctgctgcagctgatctaattacagagaaatcaatttatactgcatctgctgggatcagctgaaagcacaggatgagcagagcacagagcagaaaatcaagagccaatgaacagctcaccacaaggccactgttttgcaggaataagctgctgaagtttaatgctgcctgagctgaccctagactcacacccattctcctccagccctgcaagttccatttcctaaagcat

SEQ ID NO: 564 - DNA, 2072 bp, Homo sapiens
tgagacaaggtctggctctattgcctaggctggagtccagtggtgccgtctcagctcaatgcaacctccacctcgcaggctcaagctatccttccacctcagcctccccagtagctgggattacgggtgcacaccaccaatgcccggctaatttttgtagagacagggtttcaccatgttgcctaggctggtctcaaactcctgagcttaagcaatctgcccacctaggcctcccaaagtgctgggattacaggcatgaatcaccaggcccagccagtaatttcaatattcaaatcttcctcattggctagtagtcaacactgctactctgcaccacagaattcagtcaagaaacttcccaaattttatgagttcttcctcttcatgacagttcccagttgagaggatgcaattcttagattatatcaaaacatctgttttgctattttggttctgtttgttatccctacatagaaacgtcccaaaccacaggcaagcccatttctcagagagaaaattttaaagaagttttcaaagactttgcttataaattatagtactaatcatcaaatactcactgagcacctattatgccccaaaccggagattgttgtttctcaaaaaccgctcctctgcatggttcctaacttcctttcctttaacttgcctcttctgctcctcccagtccagaaatgttctctccctgcacagcatgttttaatctcctagcaacttccaaacatttatttaaataattatttatttcaatagccaaaggtaatatggaaaggcaccctcaggaccagactgtccaaaagggttgagggaacaggggaaggaattgagaaagcaggttcttgcttatggttacatgaaactgtatagcaaattttctgcttctaaaagtaattgccagcaattttctctatctttcaaaaactgaagcacagtctctttcccttttctttctcattctgctgccccattctcagagtctccctgggaggcaaagcttatatggcaaagcaacattattaagggacaaaactccctggcaccaggatgtattcttagctgaacatactgcatctttcagcccaattataatctgaagggcagccacccaatcagtccctgcacctctatgtgagaaaatgggttccatttgcttctctgttagagacaatcatggacatttacacttaaatccaacataaagctaagcaatattaatcctttcatccacagactatcactgggcttagaaggttgcaacataagtactctaaaatttagataggagaatgaaggtcatcctcagaagtactttttagcacaggaagaataatgattatgaatatggatatatggcaagagtttcttgaagccagatgtagggaacagtctaatgggcctggaacagaagcaacaactgctagtactcctaagcctctttaaaacagtattatccatctgtacccgagagaaaatagcaaatcacagccagcacaggatgagccaagctagtaaccagctggaacctgactctgctgaagtggactatagcatctgccacctaaacacaggcagcctctctggcagctgccactggtaaaagggaatgagccactgtattattagtggaagaaactcacagacctgctactggagaagcccagatgttgctaagagctacagatgtgccagaggcaaagaccaaaataccgacagcaaagaaagcatgagctaccactggaatacaggcactaagagggcaccaccacccaaacatacacatccagcctttatttattaacacttacatatggaaataggtattccctgctgcagctgatctaattacagagaaatcaatttatactgcatctgctgggatcagctgaaagcacaggatgagcagagcacagagcagaaaatcaagagccaatgaacagctcaccacaaggccactgttttgcaggaataagctgctgaagtttaatgctgcctgagctgaccctagactcacacccattctcctccagccctgcaagttccatttcctaaagcat

SEQ ID NO: 565 - DNA, 2072 bp, Homo sapiens
tgagacaaggtctggctctattgcctaggctggagtccagtggtgccgtctcagctcaatgcaacctccacctcgcaggctcaagctatccttccacctcagcctccccagtagctgggattacgggtgcacaccaccaatgcccggctaatttttgtagagacagggtttcaccatgttgcctaggctggtctcaaactcctgagcttaagcaatctgcccacctaggcctcccaaagtgctgggattacaggcatgaatcaccaggcccagccagtaatttcaatattcaaatcttcctcattggctagtagtcaacactgctactctgcaccacagaattcagtcaagaaacttcccaaattttatgagttcttcctcttcatgacagttcccagttgagaggatgcaattcttagattatatcaaaacatctgttttgctattttggttctgtttgttatccctacatagaaacgtcccaaaccacaggcaagcccatttctcagagagaaaattttaaagaagttttcaaagactttgcttataaattatagtactaatcatcaaatactcactgagcacctattatgccccaaaccggagattgttgtttctcaaaaaccgctcctctgcatggttcctaacttcctttcctttaacttgcctcttctgctcctcccagtccagaaatgttctctccctgcacagcatgttttaatctcctagcaacttccaaacatttatttaaataattatttatttcaatagccaaaggtaatatggaaaggcaccctcaggaccagactgtccaaaagggttgagggaacaggggaaggaattgagaaagcaggttcttgcttatggttacatgaaactgtatagcaaattttctgcttctaaaagtaattgccagcaattttctctatctttcaaaaactgaagcacagtctctttcccttttctttctcattctgctgccccattctcagagtctccctgggaggcaaagcttatatggcaaagcaacattattaagggacaaaactccctggcaccaggatgtattcttagctgaacatactgcatctttcagcccaattataatctgaagggcagccacccaatcagtccctgcacctctatgtgagaaaatgggttccatttgcttctctgttagagacaatcatggacatttacacttaaatccaacataaagctaagcaatattaatcctttcatccacagactatcactgggcttagaaggttgcaacataagtactctaaaatttagataggagaatgaaggtcatcctcagaagtactttttagcacaggaagaataatgattatgaatatggatatatggcaagagtttcttgaagccagatgtagggaacagtctaatgggcctggaacagaagcaacaactgctagtactcctaagcctctttaaaacagtattatccatctgtacccgagagaaaatagcaaatcacagccagcacaggatgagccaagctagtaaccagctggaacctgactctgctgaagtggactatagcatctgccacctaaacacaggcagcctctctggcagctgccactggtaaaagggaatgagccactgtattattagcggaagaaactcacagacctgctactggagaagcccagatgttgctaagagctacagatgtgccagaggcaaagaccaaaataccgacagcaaagaaagcatgagctaccactggaatacaggcactaagagggcaccaccacccaaacatacacatccagcctttatttattaacacttacatatggaaataggtattccctgctgcagctgatctaattacagagaaatcaatttatactgcatctgctgggatcagctgaaagcacaggatgagcagagcacagagcagaaaatcaagagccaatgaacagctcaccacaaggccactgttttgcaggaataagctgctgaagtttaatgctgcctgagctgaccctagactcacacccattctcctccagccctgcaagttccatttcctaaagcat

SEQ ID NO: 566 - DNA, 712 bp, Homo sapiens
gctctgtctggaggggtccagtgtggggtgcctgagggcactagggagaggtgctcctgctgcaggaggacctgagggtcagggcttggagaggacagggaacctgcggccgtctcttctgctttggggcaggggctctggcccgggagagggaacggggacaggagcagaggacggtcatccaggcgcagcggggagctgctccccaggccacagcagacagcactgctgagaggcagcggccgcgcgggtgacgcaaatggcaggccctgggaatcccgccgcctcccacctagaattgtcctacctcccccaccccaaacaccagcttttcctggcgccccaggcccagaacgtgggcccagagagccttgctggggtctctggggcaccttggccttgctctgaggctggaaggagaaggaccagggtgcggcatcactcggcctcagggacccctctgccctgcccagcactggccccgacccgtgctcccgccgtctgcccagagcaggacctcaacctcctggagggcacagggagcggctgagtgggcacaaatcctggcaggagaaaggcccaggctgaggccaggcctgggaaacatccaagcagtgaggacacgcgtgtttgacaactgctcccctgaataaatgcgaggataaatgtttgattctttccccgagcaaatattgtccctggagccgagtgc

SEQ ID NO: 567 - DNA, 712 bp, Homo sapiens
gctctgtctggaggggtccagtgtggggtgcctgagggcactagggagaggtgctcctgctgcaggaggacctgagggtcagggcttggagaggacagggaacctgcggccgtctcttctgctttggggcaggggctctggcccgggagagggaacggggacaggagcagaggacggtcatccaggcgcagcggggagctgctccccaggccacagcagacagcactgctgagaggcagcggccgcgcgggtgacgcaaatggcaggccctgggaatcccgccgcctcccacctagaattgtcctacctcccccaccccaaacaccagcttttcctggcgccccaggcccagaacgtgggcccagagagccttgctggggtctctggggcaacttggccttgctctgaggctggaaggagaaggaccagggtgcggcatcactcggcctcagggacccctctgccctgcccagcactggccccgacccgtgctcccgccgtctgcccagagcaggacctcaacctcctggagggcacagggagcggctgagtgggcacaaatcctggcaggagaaaggcccaggctgaggccaggcctgggaaacatccaagcagtgaggacacgcgtgtttgacaactgctcccctgaataaatgcgaggataaatgtttgattctttccccgagcaaatattgtccctggagccgagtgc

SEQ ID NO: 568 - DNA, 712 bp, Homo sapiens; identical to SEQ ID NO: 566

SEQ ID NO: 569 - DNA, 402 bp, Homo sapiens
ctggtgttcgcgaacgtgcaggaggcggctacctgcaacgcatgctgaccgagacgcgtggtgctgtggggcgccgtcttcatcatctacacgccagtgctggctatctatgcgccgctgctggtcatctgcctgtgctacctgctcatcgtggtgaaggtgagggcggcgggcgtgcgcgtgggctgcgtgcggcggcgctcggagcggaaggtgacgcgcatggtgttggtggtggtgctggtgtttgcgggatgttggctgcccttcttcaccgtcaacatcgtcaacctggccgtggcgctgccccaggagcccgcctccgccggcctctacttcttcgtggtcatcctctcctacgccaacagctgtgccaaccccgtcctctacggcttcctctct

SEQ ID NO: 570 - DNA, 705 bp, Homo sapiens
gtcaccaacatctacattctcaacctggcagtggccgacgtcctgtacatgctggggctgcctttcctggccacgcagaacgccgcgtccttctggcccttcggccccgtcctgtgccgcctggtcatgacgctggacggcgtcaaccagttcaccagtgtcttctgcctgacagtcatgagcgtggaccgctacctggcagtggtgcacccgctgagctcggcccgctggcgccgcccgcgtgtggccaagctggcgagcgccgcggcctgggtcctgtctctgtgcatgtcgctgccgctcctggtgttcgcggacgtgcaggagggcggtacctgcaacgccagctggccggagcccgtggggctgtggggcgccgtcttcatcatctacacggccgtgctgggcttcttcgcgccgctgctggtcatctgcctgtgctacctgctcatcgtggtgaaggtgagggcggcgggcgtgcgcgtgggctgcgtgcggcggcgctcggagcggaaggtgacgcgcatggtgttggtggtggtgctggtgtttgcgggatgttggctgcccttcttcaccgtcaacatcgtcaacctggccgtggcgctgccccaggagcccgcctccgccggcctctacttcttcgtggtcatcctctcctacgccaacagctgtgccaaccccgtcctctacggcttcctctct

SEQ ID NO: 571 - DNA, 705 bp, Homo sapiens; identical to SEQ ID NO: 570

SEQ ID NO: 572 - DNA, 532 bp, Homo sapiens
cttaaatccacccccagcaaggcctgccccagaaccacccatcaccctccagtgcagtcaggtggaccagaggtccctagagaagtggcaggagctcagacttaggttgagtcctggctccgcttcttgctagctacgtggccttaggtgaattacttggcttctctgagcctcagtccttcatctctaaaagggcaagatgatcctgacctcattgactgttaggaagatccaaggacatctcacatggaatggagtaacaacatcaatgctggctttcatctgaagccgtgctcccctcttgagcacccccagcagggccccctctgcccatggctcactgctccatgaggcagcccatgcccagtggaccagttcgggccagccccaccttgagctcctgggtctgacctctggagcaagaagctgctccatgacattggacacttcacatcttctcaactatgggttgaacatttcccacaaagtccatgtgttggaaacttaatccctactacaacagtgttgagag

SEQ ID NO: 573 - DNA, 664 bp, Homo sapiens
tggtcagtaggcactgttccttccttgcttggtgggtttggtggatgtctctgttctctagaggatgccaggggccagtgaggcagccaggagagcatctgccctggccactcatcagggtcctctcgccagctttctcccacgtggtggagaacacggccttcttcggcgatgtggtgctgcgcttcccgaggattgtgcactattactttgaccacaactccaactggaacctcctcatccgctggggtatcagtttctgcaaccagacaggcgtcttcaaccaggggccccactcgcccatcctcagcctggtaaggactggggtggaggtggcccgggagccctctgtcgggtagtggactaggatcctcacatctgccttcagttgggcctgaacgtcagtgcttggttacattttctttgtggagcttcagggtatcttgggccacagaggccccatttcaagggattctgtgctgacccagttcccatgggatcatcatgtggcccacatctgcccaagtcaggagtctgggtcccagcatggaaggaatgactctctggtgagcaggactcaggagaaggcagatgatgactagtgtttcttcatctgcagatggcccaggagctggggatcagtgagaaagactccaacttccag

SEQ ID NO: 574 - DNA, 14637 bp, Homo sapiens
taatgaaagaacaaaactgtaatgaccagggtatagtagaaacaggattttaatataatattcaagtctagcatttgctatttacaacaaataaatattgcccctccccaatcagtaaacaaacattttttttttctttttgctttttatacaaatattcaatcaccccacccccaccccaaatcctccttcctcactaacccccgtcttgcatggtctcgtaaagcccaggacgcagtggtgaatggcacttgcagtggcatgagattcaacatcgatgggactcagctgggactgtcctcactcaccgggtgcagagtctggtccatgaagagggtttctctctctgctcccaggggagggctggggtaagcggtgggtgagactccctcactctcagttggccctgatgatggaatctttggtgcagcctgagaaaggctagagtggtgggaggggccgggacccctgcgaaggtcacaggccagtgcctgtgggcatgagagaactgcagtggtcacagtgggtgctctggggtgcccatgggcacaggtggcagtgacccacacctgggaaggtgtcagggaagtgtacagaggtggcgcccgggggcaggcagggcaccatgccatgcccgttggcactgctccttggcaaaagtcagctagtcctctggttccagagagcagaaggcacctaaggcagcgagtggtccacgggaggccaggtcagcctgaccaatggcaggcgtcaatcccagcagcgggagaggttcaggatgaaactggagtctggggtaccctgggctggcaggtgggaggaaggcgcccagctggcctgggccactctggtccataagtgcttggctaccagccagccagaccctgggaggatgccctcagaagatgcccttggcaatcttgagtcctttctgcttcatgcgagggagggtggagctggctccgtgcttgaccttcactcccttggtgaaggtccgcttcttcaggacaaagtcatagttggcagtagagttcatggcatagaagacgttggcgttttcagggatcttcagctctggtggggaggggcagaggggtgatcagggatgctcctgggggccctgcaggatacccctaccgcttgagagcccatacaaggactgtcttgagccacagacctcagatcccctccaatacagctccagaactccaaggacccctctcaatgactcctgcctgaggacagactctgctgaggtcctcacaaaacctgatgactcttgtttaaacagggactgactccagaaccccccggcttggcctgagctggcagagggtcaccccgtcctgcccatactgcagtgctggctgcccacctggaacaggctttctagaatccaggtcacctcccagaatcctgccctactcaggacaagggatccaaggaccaggaaaggacaggcctgccccagggctctggcgcccgttccagggaggcctgtactccttgaaccctggcacccggcaagcacttccttttggctccatttcccaccatctcctctggcccacagcctgctataaaccagagctgggctcgatttgtgctcctgccgacatcgtgtggcttttcgtcatctttaacctctctaggcctcagtcttccttttctgtaagatgggggtcccgcctaccctgcccacctaaccgaaatggtgcaagaagctgccagaggatttagactgtaacttctagggatcacaggagtcattgcttactgtctgggctaatggtgggaggtggtgttcagctcactggaaagaaaacagcgatgatagtatttatagttaacttttatggtgcacatagatgctttatatatacatgcatatatatacacacacatatacatgcatatatatacacacacatatacatgcatatatatacacatatatacatacatatagatttttacatatatgatgaacacactggctactttcatttccatttgggggatgagaagacaagcacagagggcttaaggagcttgcccagcgtctccaggcccaggataccccactctgagcctgcactggttcttgacactttcccagtttctagaatactgagttggcctcctagtagcctgttctgcttttagaatcacacactcatggattttaacacttgacactttggtccacagctgtcaccattctttgtagagcacatgttttcttgtcttagccagaaagcgtcccttccagtgggccacgtggctaacctgtcccagtgaaaaatgccttttctctttgctcctcactgatgtgagctttgaactgcctgttcacgcctagggaagggcacacactggggaggtccagtggttgctggggacagcaagcagacaatgggggcagccagggctgccctgtccacagtgtctacccacactctgctggtgaattttctggggccaaaggcttccaacctggggctggggagtggtgtggacctgccccctctgccatcgccctctggtcttctgacttactccggtcatctgagagaatctgcagcagctcatagtcctccggctcctcctcctccaggttgtgtttgtccatggccttgcggattacagccggagccttatcttggctggtcacctgcatcgcggcgggggatggaccatcagggaaaagaccctggagcggctcccccagagtgcagtggccaaggaccctctggagtcccctcagcaccaagcacaggcactcacagcctctggccaggtgctgggtccggagagggccttgtcacattctcctactccccaagtgaggcctccgtccttctgttccccatgtgaggcctccatggaatgaggaggggtctgtcccagcagtgcctaccctgcttctcctgtaagagactgttccctcctcccacacttccttgagaagcacttgcccctccaggataacagcatcactgagcctggggaacagacagtccctagtccaagccctggaggtaagaaaggaggggccggccaggatgctcagtgtggtcagcataggccaggcccctgctaccttgaccctgagggccagagcacaggcggaactcggacatagggccacaggtgactgcttaatgacaaccatgctagctcctggcaatgaggggtcaggagcgtgtgtgaataatggggcacctgacccagggctggggtacagagggtgggggttacaaatggttcatctgtcgcaggacacctggaggatgaagaaagagcccccaggcaaacccattctgtgagcaattcccatctgctgtctccaaatcctgtctagactctgaccctgctggccccttccagggctcccagcctggttgccacagcggcctcctaaccaacacccctgcggctctggtaccagcccacgccagacagagaagccagccatcattgctcctgtcttcctccccgagaaagtcgaggtcctggcagggctcagggcctatgtggccaggccctggatacttccctgacctcacctcccctacagcacagccccttcagctcctgggggctttgcacggctgctcctttcctccccctctgccctcaggccagccttgtccctgatcactaccttcttcatttctgtacctggctgacatctgtccttccccgccaactacaaggtagaccccggaagggcagggatggtgcactgtgttcagggtgcatttgccgccagtggagggaggcacccaggccacccccgccggcttaccaggatgctcttgtacatgttgccattgtccacgtccaggctgacgcggatgatacagcagtcgcccacctgctggttgtagagcggcagcgcggagctggagttgcagagccctgagacagagcgcttgtgggtgcgtgtggcagccacgggcgtggtggaggctgaggaggacgaggtgctgctggaggctgagctgatgccggaggtctccggggatgactgtgaggctgattcccagaactgagggagacggtaagatcagcagatcccactgccctgtgggggcaccccaggccagctgccagatggggaaccttctagaagctgtgttcaggatccagggcttcctggccccatgcatggatttggagtggggagatgggaaaggatattggggagaagggcaggcagtcaccttcttttcctggccatcaggagactccgggacgaagctgatgttgatctcctccacgtcggagctagaggagccggccgagtgcacgctgagcgcgtcagcgatgtccccgctgctgaggtaggggccacacctgagctggtcacaggacttggagtgggagctgccactggtactgagctcagtgctgggggcctggcggctgggtgaagagttggcttagttaagggggctccccaaggacacatcccaaccccatagcccctgcaccctgcgcccaaggactgtgcaaagtgctgggacagttgccagtactccattcaccacagccatctgggagagcatttagtatcaccccatttcacagaggaggaaactgaggcccaaaaaggtgaggggactcatcccagtctcagggccagtcagcagcagggtaggattccagggccagcctccctgactccctgagcccaggctcagccctgaagcttctgagccccaaggcagctgcccctaccacccttggccaggcccttactcgctccagcgcttgacaatggctgtgttcttcttggtcctgagggtgttgctggctgactcggatgggggctccagctcgcacgacaggttgtagctatgagcagaggggcagtggtgtgacaaccaggggccatgctccggccttcccccagcacctgcccagaagctggagtcggggtgccccggccatcctcaggcaacaggggctgaggctgaccatgggtcatagctgctggccctctggagctggccccctaggacagcctgcccccactgtccccatttgctcccccggcctcacctctcagtctcgctgagccgctccacggcccggaaccaggccccaaattgctcatctggcgcgatgctgtagttgttgcaggccgactgcagcagcttgatctgggcgatcacctcgaactcctggggccagagggaagcacagggcggtgacaaggccccccgggcagcacaggggccagtctctgggtctttgttcttggggtcccttccccccctctactcccatccaggccttcctgttctcaaagttgggctcagccactccccaggaggtggtcctggattataacctcctaccctcaccctccagtgggaggggacccccttctctctgtgtccaaatgtcccatgtcccatgaatctaaggagagggtaggagttgaaatgtcctaccctggtgggtctgttttccacccctccccaagtcagggctgcctgcagctgcttaccttcctcctcttctcaaagttgatgagtctgccctggaaggtggacacccaatggccgtcagaaagtgaccccttgaccattacagtctccccacctcatgctgcactatcaagagtgcccaccagggggcagggcacgcacacccctggattgaagccggtgctgggcaccagggcaaggggacatgcgggcagaggcttggggacttcttgtccagcactctcggaggacaatggactgaggccttgggtgagaaggccctgctcagccaccacgtgccgcctgaccgctgagggcctggcttccctctgtgctcagggtcactgcctgagggatgggctgtgtcccactcagccaaaccctgctgcagctctgtgtttgggcagccctggggtgtcaccagcagggcactgagctgtttactcattgctgggacaggtgtggcagcccagcccccagggctcagggaaggtctctcctcccgggccctactccagccccgcccggcacactcacatacagatagtccttcatggcagtgtccagcatcaccaggtcggtgaggaacgtgcccaggtagggaacggtgccctggatgatgccctgtgacattggggtaggaggatgagcaaggcccctcccctgaaggctttctcagcccccagccccaactggtctcacttggaacagctgggggacctctgggggcctcctggggcccactgtctccctggaccccagactccctctagccatctccctggctggcatctgggaaatgccaggttcccaagtcgtgtggcccctggccctccccagccccacacccgcctgagccggctctgccaggcctgtcctttcgtggctgcagctggtcttcccagataccagctgatccaggtgtggctctgctagggtccagaggaggctacctctaatggggcccataggcaccgtggctagagaggaaagggccctcctccctacccccaggccagccccctgcccctccgcggccttgggcactctcaccgtctccttcggccgtttctgggctctcttggggttcatctccagggtggcaaacttggaggtgccctcctgccagggtagaggacagggtcagcaaggccgtatcccctcagccctcaggcaccctgacctggggtgctgccagtgtggtcgggttccagggctgaccctgtatcaatactcactagtgtggggtcctgggccggtggcctggccttcctgagcctgcctccccctctggaaagtgcggatgagaactccgcctgctgcatggtgcggtggctcacgcctgtaatcccagcattttggaaggccaaggcaggtggatcacttgaggtcaggagtttaagaccagcctggccaacacagtgaaaccccatctctactaaaaaatacaaaaattacctgggttggtggtgcacacctataatcccagctacttgggaagctgaggcaggagaatcccttgaacccaggaggtggggattgcagtgagccgagatcacgccattgcactccagcctgggagacagagcgagactccttctctaaacaaataaaaaaactccacctgcctcgcagggcctcagagactctgcgctacagtcctgttatggctgcacactcctttctcccttgaaccttccataaggtcagcaccccagggctggcattcctccattttctagatgaggaaactatggccctgagatgggcagtgacttgccctgggccccccagggactcagaacaggctcttctgtcctagccagaggctctgccccatctgcctttacccgtttggtcactgatcagggtaccgtcctctgggcttctcgtgcatgccagggcccccagtggagctgtgccatggagggagagggacaggtgtcccaggagccccctgcgatgctcccctgtagggaactctgtgtgtgtccacgcaggaggggggccctagatgccatttcactgaccgggtatgccaggggcaccaggcagtgacacttgactccctctgaggcctcgtgaatccattagtcactgaaagttctcctcagtcatctggggtatccgccacagctaatggggtgccatgggaagaattctacagggttctctggtcagtgtctcttctcggggcagggtagggaagccacatggggcctccaaatctgcctcccaggtctggccacctggcccctggcatcccctgcagctcctgtccctggggtaggcaggctgccctctccttgggtgtgtagagcagacagaggtagcgtcaggagcctggcctcccggggacagactgggccggtgtgggggcaggagccgcatccccttcccacccagcaggagggaccggcgaggaagccagaggcctgctggtcctgatgcccatctactcctcctggaacctccactgctacccttactgtgtccaattaactggggccctgtccctcaaacacccaggggccaaacagatccctcttcccccttcacgcacacgggaaaggaactttcccagcaagaagcgaatgccaccgcccgccgccccagcccccgccccagcccccgccccagccccagcccccgccccagcccccgccccagcccccgccccagcctgccgccactccaccttgatgagcagctcccggctcaatgagtagttgttctcatctgagaagatctctgacagcttctgaaagatccggaaactgtccctgtcagaagggcaaagaaggaaagagaaagctgggaatggtagggaggggtgtgagtgcaaatccgttttattttagagctgaaagaccccagactgcctgaacgcagcacacagggtaccccagagcactaacgctctgcaggtctggggagggggccttcatgttggtgcaacaggaccccattcccgtttccactgagcagctatttccaaaggggtttttttctttttttggagacagtttcagtcacccaggctggagtgcagtggccagatgtcgactcattgcaacctctacctcctgggtccaagaaattctcctgcctcagcctcccaagtagctgggattacaggcgttagccattgcgcctggcacaaaggttttgatttcaattggatgagggttctgtggctacaacacgaatacctgaaaatctctgatgtggctcaacccaccatctgacagcttaggaagccgagctctgaggcagagctgctgccaactcaggtcagtgaagggtccctgccctcagggtttgtggcctcccatgggctcactaagggggtgatgccagccctgtgggaggtccctggtgcaccaggagctcctacagaggcatgcccacctggaaacgtcttcccacgtcttcttcagacggtggatggagttgctctgcagggcagagaggatggcatacagtgacgagaagttcttgaggatccggcactcctggggcgggaagagcaggaggcatgaggtggggctggagctcccagcttgcctggcctcagtcccccttggccaagcctcccctcctaatgagacagacacccagggagtccccagagggcacgcctgcgacccgggggtgacaggaggattttagctcaacccaaggaaagagtgtaaggaagacgtgagcatccaggcagtgggctgggagagtcaaggccagcatgcccctgggaagggtagactggggcctgtacagggccttggactgcagaccacaacctgagaacagatgaagccaaagtgggggcccaggcccctcctctggcataccctggccacctcgatccagtgctccaccaccctggccctgtctggggctttcgtgcttcggttcccgaggcaggtggtgatgacacagttggccacactgttgaactgggtgacagtggcgcggatggtgggcgccaggtgctccttgcccttcttgtcccgctgggaccagatggagcccaggcagtggtagggcaccaccttcttgaacagttcctggggaggaggctaaatgtcacctggtcctgccccagcagtctgggctggtgctggggaagctgaggatgcagcttgagccttgtggggatctctgggttttatcccgtgtccatgcagggtgcccagcacacaagtgacccgggacagaacgctggtgggaagaagaggagcaccgcctcgcgcagcctcaccaagccccagctccaacaggcggctcacgcctgcccaccccccgtccccccgcctcagtctgctccccatccagacgcacatctgctgtgggcgctacaactaagggctttgtccagtgtctgccataggctccaggacacaccaagtgcctaatgagtgctgaggctggtgagcctcctgaacagatgggggtgacccatggatgcaccttggtgagcaccctccgctcccacaggccaggcctgctgagcttcctgtctgttccatctagaatctgcacagtcactctggaggataggggtgacctcatctctactgtccagaggtaaactgaggacttggggttaaggaacgacctggttacttggtgtgtagcagcagagctgggatttgaccagaacatcagctctggatcagcaaatggtaggtctgggacagcagatgctgccagaaggcaggcccacccctgccctgccaagctgagctgctcaccgcatccatcagtgtaaactgctctgccaccagatctggagggaacaccaagaggtgaggcttctcctcactcagcccgttctctgcaaccacaggtgaaggccaggaaggctgtaatgatggaactggtgctggagctggctccagctctagagtttgtgagggagctggatcctgttctggagctggctctagttccagagctggcgctggagccgattctagtcccacagctggctctggagcctgctggagctccggagctggtgctggagctacttctagctctgaacctggagctggtgttggagctggctctggctccggggctggagccggcactgggctgggtgctcgagctggtgttagagctagctcgagctctggagttggttttagagctggcactggtgacagagctgcaagaggagaaaagttcaacaacatgccagcctttcctgtgcctttccaaagacacagaacagccccggcttccagagaagcctctctccccgaacccacaaaacgtgtaccaggccactctcctgcctgtggtccctgcctgtgtggtctgaggctcatctgggcccctgacccagcaccagaccctggagcctcctcttcgtgtggcccagcaccgacccctcctcattcaccctctggcacccaccccagtcctcctcaccctcaggctctgcctcaatgggttccgagtgctccagctgggccaggagaaggtgggcacggcgctccaggtctgagcctggcatgttgagctgcacgtaggccaccagctgcttgaggcagggaaagtccggaggttgacagaaatcctccgagtactggtccagccaggtgcccaggatggaggagatggcactggggacaggtgggtggcagcagagtcagaggcctgggctcccctgagccaggctgggctcctgagccggcccctgtccatctgaaggccacctgccccggcccaagcccccttggctgtccagctaaaagaaccaaggaggcccctggtcagtggcgaacacctctcccctcctccaaggaagccccgcccacagctctgcatgtctcccagcaccccctcctcgctggaatgtaaactccatgagggatcggtcctcctgccgggcatctgcaggtccctggcggctcctcaacttgtagctcagtgctggtgagctgccttactctctcagagctgtgtgtgggtctcatcttcccactaatcctgttctcccagagggtggggtgcagcctgcccgctgagcactcactattgaggggtgaggcaatgtgagagcagaggctcaccccacctcttgccaggggcccctagatcagggcccactgagccaaggccagctgggatgaggctatggtgggatgagttcccgccgggggctgccccgagccccagccaccccaggacccctccacagctctcggtcgtctttcttcctgcaggcgaagcccccagaccccagccctctagcaggaaccacaagaggtgtgggagccagggttctgcccagccagccccggctccggccccagccccatgtactctcccactgttcggtggggacagggtcccttcctcttggctcaaagctcactcactttttaagttggtcctggggtccaccatcctcgtcggaataggggaggatgcagccgtatctagaggaggccgtgagggcgtcacatctaccgtacctgcttatgacgtctagtgttactgtctgactctccgactagaacggaggcccaggagggcagggatttttttttttgctttttttcatcaaattatattaaatgcctagaaaagggccagcacacagtaggtgcttcatatatatttgttcaatgaataagtcccaaccagctccttcccagctatctgagcgccccttgggtccctccaacagcccccagatagaatccggaatctccttgacaagtgggaaaactgcttcgcccaaggccacatacaagagaggcttggggcagagagcttccccatgggggacaggaaaatcataaaaacgagcaccacagccccgcagcccattccctacagggccaggcgttgagggagcactttccacgcctcatcccgcccaggcatggtgacaaccccatgaggtcctcttagcactccagtttctctttcatatgagcaaagcgaggctcagagaggtgaatcagcattgccaagacccgcagccaggtgggggtgggggcgagggcccctgtgcaccctgtgcagtggagggctcatgctcaccttttgaacagcaggtccaggacctgttgggtggtggtgaaggctctataggtacacaggaagatggtgacgtaggagaggtcgctgccctggaaggctggcaccaggtgctccaccagcttctccagcgtgccagccttcacggtccgcaccttgcaagtctcataaaggttcagggccgactcattctcatactggggtgggacagaggagggacagacagtcagtggcagcacacgaatctcctggagctcagatggaaccccgagccctcagcagcttgtggcaagaggcaggactgagtatctctagcagaaaaaggttatcagctttaaaagtagaatttcaggccaggtgtggtggctcacatcagtcatcccggcactttgggaggccaaggtgggagcatcacttgaagccaagagtttgagaccagcctgggcaacaaagtgaaatcccccagctctacaaaaaaattgtttacaaaacttaaaaattagccagggccaggcatagtagcttacgcctgtcatcccagcattttgggaggctgaggtgggcaaattgcttgagcccaggagtttgagaccagcctgggcaacatggcaaaaccccatctctacaaaaaatacaaaattagccaggtgtggtggtcccagctacctggggaactgaggtgagaagatcgcttgagcccaggaggtcaaggctgctgtgagctatgatcatacctctgcatggcagcctgggtgacagagtgagaccctgtctctaaaagagtgaaaaaatttttaaagtagaatttgaggtgcgggaatgatttaaatactgacaccttcaggtccgttgttagctgagtaatggtagctgccctgtgggaagagcgtcatctgagagctctaacaaaatatccccattctagagatgaggaaacagaggcttatccaggggctgggagggactggcccgttaggacgcacagcatcttccccgtggcactgttttgttttgttttgagacagtcacccaggctagagtgcagtggtgtgatctcggctcactgcaacctcagcgtcctgggctgaagcaattctcatgtctcagcctcccaagtagttgggattacaggcacacaccaccatgcttggctaatttttgtatttttagtagagatggggtttcaccatgtgggccaggctggtctcaaactcctgaccttaggcaatcctcctgccttggcctcccaaaatgctgggattacaggcatgagccactgcgcctggctcctgcagcactgttgaagtgtcctcagaggactcacagtggccccacagccatgaggagctgaactggggcagtggctccagcctcccttctggaatattatgcagctgagtcaggccccggctctcaacctggaggaaccccagggatgtgttctgggagatggcaacttgcagagacctaacagcctgaagcccttttgtccttgggtgaagacagccccactactccagatggtgtgcacatctgggagaaggcatggaggatggtgaggctgatggctgcacacccggggaagggaggtcaaacatgaaaacccgattaagcctgggctggacagtgggggtcgggaagggagtgaaggccgtttcctttgggatcagaactgggggccctcaagtgaaaaagtcctgggagggatccccagctgcgtctcccagtggagaccccgagcgcactcaccccgagccagcgctgccccttgttgcctccgtggtgcagctgcaccttgcgcagggagatggagtagatgactccgttgatcagctcctcaccgatctcctgcgtggagctctgtgaagacaacgcccggcagccgggcgcggggacgtcaagggcctgcctggccaccgtgcaggggatgcacctgtgtaacctgtttcccagatagggcacagactggcggctgcacagacctacagcctggggtggaatgagatcacagctcgagagccactgtcccggcactccacttccccaacccggccagccacgacctgggacgtgatta

SEQ ID NO: 575 - DNA, 117 bp, Homo sapiens
tagtagagatggggtttcaccatgttagccaggatggtctcgatctcctgacctcatgatccacctgccttggcctcccaaagtgctgggattacaggcatgagccaccacgcctgg

SEQ ID NO: 576 - DNA, 7044 bp, Homo sapiens
cggtgagcgcgcggcggaatctggagccggggggcgtggagctcgggccgcgctccaggtctcatgcgctctgctttccccgcaggataaggagaagaagaaaaaggagagcatcttggacttgtccaagtacatcgacaagacgatccgggtaaagttccagggaggccgcgaaggtgaggaggctcccgctgtcggtaccccctctttaaaaatttcaaataaacccagcaacagagatgatgaggacgcatgcggaagcacctcttttatttattttcattattttttttgagacgcagtctcgctctgtcacccgggctggagtgcagtggtgcgatctcagctcactgcaacctccgcctcccaggttcaagtgattcttgtgcctcagcctcccgagtagctggaattaatgtgtaccaccacgcccggctaatatttgtatttttagtagagaggccatgttggccaggatggtctcaaactcctggcctcaagcgatctgcctgcctcagccccctaaattgctgggatttcaggcatgagccaccatgcccagcctagcatttttgactgggcaagtgagctgccttctcctagcctccgtttcctcatttgtcaaatggggctggtaactccacccacttcacagggggtggtgagaatgaatggttacaggcatgtaatgtaattgaggcagctctcagcaggaagtaagcagtcagacaacacgtcacttattcaatagcctcttggatctttggtttcttttttttgtaagacggggacccaaacctctttgtccctggattgtagacaactgggtggcatgagagttattaaaaatcacagtgccccagccggacggggcggctcacgtgtgtaatcccagcaatttgggagtctgaagcaggagggtggcttcaccctagggtttgaggctgcagtgagctatgaccgcaccactgcactccagcctgggccacagagcaaggcccagtctcaaaagagaaaaaggaggccaggcacagtggctcatgcctttaatcttgacactttgggaggccgaggcaggcagatcaggaggtcaggagatcaagaccatcctggcctacgtggtgaaaccctgtctctactaaaatacaaaaagttagctgggcatggtggcgcacgcttgtagtcccagctactcggggggctgaggcaggagaattgcttgaaccccagaggcgagattgtgccaccgcactccagcctggcgatagggcaagactccgtctcaaaacaaaaagaaaaaggaatatgaataaaatgttttctcagtctacaccatgctgactccggacatggaaggacatgagtgagcggccgctcttgctggtcacactgcttccctttgttttctgcccttcatagcaaatcacccatttagcagctgaaacagcaccattttattatctcacaggatctgtgagtcaggagccagggtaccacagcctcaagggctctcaggaggttgtaactgagggttgttttttggggtccatcatcttggggtcttcttctgagcccactggttattgacagagctcagtgccttacctttgcagggccagggtccccgttctggccagtgttggctagggacacttgcagctcccggacgctgccagctcgggactctgttccaccgtggtggtctgcccctacagtgctgcaggctgagctgacatttgtccatattcagttattcgggccagtgggagaatcatctttcagaaagggtttggggccgggtgcgggggctcacgccttaatcccagcagtctgggaggctaaggcaggtggatcacctgaggtcaggagttcgagaccagcctggccaacatggcgaaaccccatctctactaaaagtacaacaattaactgggcgctgtggctcacgcctgtaatcccagcactttgggaggctgaggcgggcagatcacttgagttcaggagtttgagaccagcctggcctacatggcaaggccccatctctactaaaaatacaaaaattatttgggcatggtggcgcatgcctgtagtcccagctacttgggaggctgaggcaggagaatcgccctggaggcagaggttgcagtgagctgagatcgcgccactgcattccagcctgggcgacagagcaagactccatctcaaacacacacacacacacacacacacacacacacacacacacacacaaaaagcagaaagggtttggtccctgaagggctcacctgatgcagtcaggcccacccagggtgtttctctcttgattggctcagtcagctgattcaggggctctaattacagctgcaaagttccttgtctttgccacataacctaagcgcaggagtgacatcttgtcccgtcagagtcacaggccctagcccacactccagaggaggggcaccttggctccatgttagagacctacctacctcagtgctcacatctctccccgtgaggagggcgggctcactggtcaggctggtgccaaggacctgaacatctgcatctgaccccatcttataggtgagtttcattttgcaggggagggacttgagcaaagagagagggagccgtggaggtggaagctgaagcctgtggaggtggacggaagcttgtatgcaggcgggcagaccttctctgtagaaggccagacggcaaatatctttagctttgcagcccagatggtctctgtcacaaccactgagctatgccagcagagcaggagagccaccctggtcagcgcctgagcgggcgagtgtggtggtgggccagcgagactctgacttacagagaggagcggcgggcaggttcacctgggggtcgtagtttgcagaccctcccccgcaccaccgcacagggcggccctcggtgtgtgtggagcagccgtggacgggctctcggccctgccttgggaggagacaggcaggcagaataatgcccggggtgcctgcttcccgagattggtggtgcctgcttcccgagattggtggtgcctgcttcctgagattggcgtgggcgtgcagagggcagcaccgtaagggctgtgggttggtgtctggaggaagcacctgaaagatgacaggggtaagaaggagagcagggagggggtggctgcgggacgcccctcagtgagcgcagaggtggagctgctgctgggcctcggctgcaggagcctgcagggcagtggaggggagtcccaggcagagagggtgggctggcctctgctggggacacacagctcccccttcacccttctcagtgtcaccagacactgcggagcaggatcagatggcagagatcaccaccgggtcagagagccctaacctaagttggcaagttgtggcccaaggcggcgaagcttgaggggtggggcaggcagcgtggagagagaagccacagagaccgtctcagcccccgaagcctttgcacctgggtctcagagcatctctgttgcctgctccccgcaagccctaagcagcagggctgggatttgttcttttgtattccgtgaactcactgagggactcagcacaggtcaggcagcgcagtcatcaccgctgtcagagcggagcactctgtctcccctacaggaagccctgtccccatcagccatcactgcctgtcccatccctggccctggcacccacgcatcccttccctgtctttgtggattggcctgtcctggacatttcatagaaatgggatctcacggtgcgcagccttctgtgtctggcgtctctcactgagcgtgacgtcctcaggtgcgtcctcaggcgcatccgcgctgtggcctgcgccagcctcgctcctcttcctggctggtggtcccaccgcgtacacgtgccgccgcctgttttgctgctgcttttgagctgagaattgtttttatgacttttaaatagctagaaagggatcaaaacaagactgtctcacgatgtggaaattacatgaaattcacagttcagtgcctgtgagtagagctgaccggccgcagttcagccacacatggactcattaccgaagctgcctccacccaggcagcccgagccagcagctgtgaccggcaccctgtggcccacacggccagaagtgtttgccatctggccccccgcagacgtggtctgctgcctgtggtggagatcactctggaggcggctgtcatcggccactcccgggagccctctcctaccctcagtcctccatccctggagcagttagccccatacctgggccatgctggggcgggccctgcgcccaggacggatctcatgccttctcttttctctcccccggtgatttctccaagccagtggaatcctgaagggcttcgacccactcctcaaccttgtgctggacggcaccattgagtacatgcgaggtgagtggggtggcggccgaggcaggcagcgggacgagggggatagtggggtgaggggggcagcgggacgaggggggcagtgggacgaggggggcagccgtggggctccctgctggctcttcttctctcaaacccacaaaacctctgagttaccaacgtgaagcctcgtggcggccgatggacgggcttgagcgctcactggtcctagacgtcctcacaaagcaggaaaccccattgttgtggggcctggagagacgggagctgccagctcacccactggtctctacacactgacggggcgcccggcacagttagaggacaacctttttaaatgttttattattttaatttttgttaaattggtgacgtgagaggccaggcacaatggctcacacctataatcccagcgctttgggaggccaaggcaggaggatctcttgaggtcaggagtttgagaccagcctgaccaacatggtgaaaccccgtctccgctaaaaatgcaaaaaaattgctgggtgtggtggcgcatgcctgtaatcccagctgctcgggaggctgacgcaggagaatcgcttgaacctgggaggcggaggttgcagtgagccgagatggtgcaactgcactccagcctgagtaacagagtgagactccgtctcaaaaaaaagagataagctgaggtctcactgtgttgcccgggctggtctcgaactcctgggctcaagccatcctcctgcttcagcctcccacagtgctggggttccaggcgtgagctgtggcgcccagcggagagcagccttgctgtggggtagtgagcgtgccgtggggctcctctcgggcgcctttcctcttctgcccttgttaattcccgctatgaacgcagggtccctgtctcctccccagaggaccctccctcatttccctgcccccgctcgctcccctccccagtgaggccgccaagtcctcagactctcccccagaagctcctgcggcaagtccccagctggcaagtccccatcccggcccgggcactgggggaatgtcaggacttaggagagagagggtcttgccccttggatccattgatactgagacaagatttattcttgtagctggccatggtggctcatgcctgtaatcccagcactttgggaggccaagacaggaggatcactcgagcccaggaatttgagaccagcctgggcaacatagtgagaccctgtctctacaaaaaaaaaaaaaatgtaattagccaggcatggcggtacatgtgcctgtggccccagctactcaggaggctaaggcaggaggattgtttgagcccaggaggttgaggctgtgagctgtgattgcactgctgcactccaacctgagcaacagagcaagacctggtgtctgaaaaaaagtttaaaaacctgggccccatggttctcccatgcccccaccactgcaggaccacagtagtgaggagttttaatcgccttcagcctcttgagagcttgtcttgggcttgctggcacttccctggggtgccagcccacatggtccccaccccacatgaacagcctctttatttttttattttttgagatggaatctcgctctgtcacccaggctggagtgcagtggcgcgatctcggctcactgcaagctccgcctcctgggttcacaccattctcctgcctcagcctcccgagtagctgggactccaagtgcctgccaccacgcccggctaatttttttgtattttttagtagagacggggtttcaccaagttagccaggatggtctcgatctcctgacctcgtgatccgcctgccttggcctcccaaagtgctgggattacaggcgtgagccaccgcgcccggcccccagcctctttgttatagggtgaatattggccccctagggctccagggaccttgcagagaccaggaggcccagggtgcctgtattctggccggccatctgataacctggttcccggccctggtgcctgggccccagtgagctctgagacgcggggtagccggctatcacctgggccttcttgttcccatggtttgtggagtgagggagggctgtggctgctgtctgtggagctgccactggtctctaggggccatgggtctcagccgtgggagccggggacctgccccacagagcgcatcccgtctgaggtccctgcgtgctcgtggcgcctgcagggtgcaggtggggaggtcggagcgagggtcttgggtgggtggggggtctcggaggcttcctggaggtccctcagtcctctctatctgctcctccccagaccctgacgaccagtacaagctcacggaggacacccggcagctgggcctcgtggtgtgccggggcacgtccgtggtgctaatctgcccgcaggacggcatggaggccatccccaaccccttcatccagcagcaggacgcctagcctggccgggggcgcggggggtgcagggcaggcccgagcagctcggtttcccgcggacttggctgctgctcccaccgcagtaccgcctcctggaacggaagcattttcctttttgtataggttgaatttttgttttcttaataaaattgcaaacctcaatg

SEQ ID NO: 577 - DNA, 10646 bp, Homo sapiens
gtgcctgccgaggccaaagcactcactgctgttctggaagactggccgtcccggcccgtgtcagagccgcccgaccccgtcacagcacacgcacgatgcgaaactcacttcttcacgtcccgactcccggcccagtagccgccgatggcgacggtgcccacagccatgatgaagatgatgaccatgttgtagtccagcaccggctccttaggcgcatacagcgccgccctcaccgtgcggccgaaacgctgcctcaaggaacacaccggaggcaggcgtcagagccacccgccagccatgggtcgacgtgcagctgtgggctgtggggctggggctggagaccctggcctgcaggggccacgcctcacccaccaccctgatcccaccaactgaggcacaaacccccccggcagccagcccgaagccccctgccccatctcctcgggagcgtgggtctgagccggcgcagacctaccgtgaagatgtccagcatgtctttgtagctgagcagggccacgggaatgccaatctcatcatactgcgtcttattaccccccggggggacctgggggcccagaggagggagcggcaggcatcacccgcagcagtgggtgggcccccagctctgtgcccattcgcctcctctcctgggaccctcactcgaggctcgggtcaggctgggggcgcctgctggctccccctctgcagctgacagcctccggccccccaggaggacccaagaacagggaggccgaagggcatcaagccttcttcacctgacaacagggccccaggcctaaaagcgccactaatccctccctcggccgtgggactcccgaaccgcacatacaagtcctgagtgatacttgtcacagcccatgcctgcccactaagccgccttgagccccgcacccactgagggcctctctcaactacgacggcagcgtgtgcggacagggatggcactctcggctctgcccggcctgctctgccctcggccctgagcccctgcaccaggcctccgtggattgccaggctcagggtgcaacactggcgggggcagcccagagccacaggcagagctgtgagggaattcctgaactccattccttcttactccaaaactacacttcaggggcggccacgcaccctgcccagcccagcagtcggcatgtccctgtgctgtgaccagccctgccaggcccccagctctcaaccacagccccatttcacagaagatggaaaaggggccaggcttcaggccacctggctaggaccacaggcgagcacggccccaccggctagagggcaagggcaccagggtacccagaaaggaccagctcagggccaggccacctgctcctcagaagccaccccaatcccatccccacagagagtgtggtctccgtcacccctgggggctgctctaggacaggcacccaacaagaccacggccaaagttccacagccccagccagcagctcaggaagaacagactcatctccgccctccccacggccacactcggcccggatcctccccatgttcacactcggcccagatcctccccacagatggatctgcctttagcgagaagtcggaagaccagccccagctgctgccatctctgcctcctgcacccccctcctgcccctgagagctggcccagcgggggacgcacagggccgtaccagcctctccctgctgacgatgagcagcccgcgtgctccgctgccctgggccagcctcactttctcatagaaggtgcagttcccccgcgccaccagcgggatctggttgctgaagccacgggcggggaggtcggctgcggagcagagcagggaggccgtccagttgcgcagctgcaggaaagactggaaaggccagggcacagtgttgtctcacgtgatgtgagtcaccaggagggcccagctgcccgttctcccacctgaagcctgcgctgagttagatcccagccctcacctaaagccccgcacggcctcggcccacctaggcagagccatccctactgcagctcccacagccggaccctgggcgacgggctgggctgcctcatctgagcggggccggagtcctcacagacatggctgtcccctgatacctgagccaccccgcgagccgtcacagatcactcagcaagaccaagtgggtccccaccgcagccccaccacggccaggcatctgtgagaagggggagggtttccagtgtgcagagaacaaagccccaactctcaggggcctcacagcccctgaagccaagacacacacgcacacacacacgcacacgcacacacacacccacagccaggccggaacacgcgcacacacaagcacacgtccacagccaggctggagcacacggcacacacatgcatacatgcacacacacacacacacccacagccagaccagtgcacacgcacacacccacagccaggctggagtgcacacacacacacacgcacatagccgcagccaggccagcgcgcacacacacacacacccacagccaggctggagtgcatgcacacacacgtgcacacatacacagccaggccggaccacatggcacacatatgcacacgcaagcacacacatgcacactcacactcaagcagacacatgcctattacacacatgcacacacacacgcacacacagccaggccagagcacacagcacacgtgtgcatatacaagcacatacctgtgcactcaagctcacgcacacacacctattacacacacatgcatacacacacgccacatgaactcacacactcacacgcacatacctattacacatgcactcacacacactcatgcacacacacgaacccaaacacacaggcacatacacatccacacacaaacctattatccacatgtacacacacatacacacagacctattacacatgtacacacgcacacatgtgcagacacatgcacacatccacaaacataactattatgtagctacatgcttacacacacctgcacacatacagacacacatgcactcacacatccatacacaaaactattgcatgcacactcacaggcacatgtgcacataaaaacagacatacacattcagacccatgcacatgcccccacacacctattacacacatgctcacacacacaggtgtgctgacacacaaacacgcactaaggcacacatgtccatgcacatatctagtacacatgtgctcacacacacaaactcagaaatatgcactcaggcacatgtcttcacacatacctattacatgtgttcacatacctattacatgtgttgacacacacctatgtgttcacacacaaaaaaacactcaggcacatgcacacatacactgatgcaaactcacataaacatgcagacacatgagcatgtccaggcacatactgattacacacgtgctcacacgcacacactatgcataaagctgacaggaagatgctagtgcctcttcgccggcacacctcgagggctccaggagggggcgggacacagtgggaaaggaggcggggcctgagggactcagtgggaaaggaggcggggcctgagggatgcggtgggaaaggagagagggcctgagggatacggtgggaaaggaggcagggcctgagggatggggtgggaaaggaggcggggcctgaaggatgcagtgggaaaggaggcagggacagaggggtgtggtgggaaaggaggcggggccagagggatgcagtggaaaaggaggcagggcctgagggatgaagtgagaaaggaggcggggcctgagggatgcagtgggaaaggaggcggggcctgaaggatgcaatgagaaaggaggcggggcctgaagcatgcagtgggaaaggaggcggggcctgaagcatgcagtgggaaagaaggcggggcctgaaggatgcagtgagaaaggaggcggggcctgaaggatgcagtgggaaatgaggcggggcctgaaggatgcagtgggaaaggaggcggggcctgaaggatgcagtgggaaaggaggcggggcctgaaggatgcagtgggaaaggaggcggggcctgaaggatgcagtggaaaggaggcggggcctgagggatgcggtgggaaaggaggcggggcatgaggactaagtgggaaaggaggtggggcctctgagggagggactcatccagcagcaggtgttagtgccccagtcaggaagacggtgaaaggaacaggtctcgtccctggggccccactgtgccctctgctgttactcctctgaggacccctctgtctgggcccactggatagggtccccggcatggagcagtagagacccttatctaccacatggagctcggccggtgcctctggatctgcaccccaaggccgcatggacagcttgcattgatgaccagggttggggaggcccaggggaactgggggccagctaagagtcccccagacctggtcagggcctgcctctcgcctctggatctttcctgcaaccccagccggatgtgtctctagagccccggggcccccgcattctcctccgcagcggcgcccggccagcgggtactcactgccttgctgaggtcgtgcggaagatgggcccactgcgggttgtagaggatgcagtagtctttgccttcggggcccccggcctgggagaccacgtgcaccatgccgtactcacaggccacctgcaggacaaggccagcagtcagagccacagcacgggacgtgcggggctgcaccgccccacgagaaacaggcccgaggaggggaggacgcctccaggaagggcgcccatgttcaccaggtggtctgggatgcttccccctctcgacaggacagacagggacgtgaccatacgtggtttacagcaaagacccagactggctcaccttcctcagggagccccaggctggtgaccatgagtgtgtcaggtcacccctttgtggctcccgagtttctgcaccaaaaaacagggatcgcaccacctcctgggcctcccaggatcagtgggcacggtgggagaatgacagccacgggcagagccacgggcagagccctgagcagggaagcagggcagggccccagcggacctggcccccagcctgggcgggaggcctggacaagcaagcctctgcacccctcaggtctgggtggcctttgacccacagccccgtgggcactgcttgttggctggtgctccaaggcacacgggggcccaggcacacggtggggcccagacgagggggatccccagatcagcacccctcagctcccactggtagaacagcaggaagcaggtgggccaaggggcctacgggcaccgggtcctgagtgggacaggctgaggtttgcaacaggtcacgctgccaccagcaggacagacagcgtcatgttccccatgaagccccaaagcagcagagtccagcacagcagctcccacttcgcaggagggagaaggaacagccagccagggcttcaagttcctgctctccagcctgcagcagcagcagctcagagaaggccacagggagaaggcccggatccacgggcaggagcccctgacacacaacggggacaacaggccaaagccagccaagagaagcaggggtggtggccaccgcgcccaggacagaacgggctggggcccttgccacgctctcaaaatgaagtagggggcaggaccaggccccaaagccctggacgcctcccaggagggctgcggagtagacgggcctggaccagaagggacgacccccacctcttcaatttaatgcttaacagagcaggatggagctatgaggaaagacggattccacaagcaggaagctggcactgctcaccacgcctcccaccgcagggaccacggcggacactgcagggctctggcctaggcagaaccacggtcctcccagcagagcccagtccagccgcccgcacctgccatccccaccttcctcctgctcccgcaaagcccagtccagcctcccgcacctgccgtccccacctcctcctgctcccctcccagcagagcccagtccagctgcccgcacctgccatccccaccctcctcctgctcccctcccagcagagtctagtccagccgcccgcacctgccatccccaccctcctcctgctccccctcccagcagagcccagtccagccgcctgcacctgccatccccaccctcctcctgctcccctcccagcagagtctagtccagccgcccacacctgccatccccaccctcctcctgctccccctcccagcagagcccagtccagccgcccgcacctgccatccccaccctcctcctgctccccctcccagcagagcccagtccagccgcccgcacctgccatccccaccttccttctgctcccctgcccagggcccccacccagcagctgacaaagacatctccatctcgccaggatgccagtcaccagagggtctcacagcgatggggcccaggtcccagctgctgtgccacactgcagaccctcagtgtgggcccccaggggagcccggcctgcacagggaggaggggtcccagaagaaaaaccacgtgccagggaccaaggagacccaccccatgccctaggcctgcccgttctcaggagcacccagccctcagccttctggggctgcagggctcctgccaggctgtaaacctcccagacagagagacagccgcaccccctggtccccaggggacctgtcacggaaacaaacaggccacagccatttgcctcatcaggaacaggatggcagccacatgtctgaacggatgctgagctgcgcaccaaacgggccgacaccacaacgccacaagggaaaacagtgcagacgcagctctgccaagctaggactggggaaggacagctctggcttggctaaaggtcccaaaggtccctggtgccagacaccaaccccagcacacaggcacagacgggctctccaacagccgggccctcatcactgaaatcatgcaaagtctccggcctggtctgggagcatctgggtcaaggccctggtgacctcggggtggcagcatggtgaaagcccacggagccccggtccccacaatcgactgggggtctcatagctcttggctaatgctgcttccttcccacagctgccccagccccactccaagcacctcccatgtgacctcccccagagcccaggcagagtcaggagccctttctttccagttctgcccaccagactgcctgcccgtgagagcaccccttagtctggccccggtgccgagcccggagggtgccccttccaacacagccccccagaacccctcctccaggagggatgttatgggtcacggcagaggccaagaatccacagtccggcccaccttctgtgtttgtaaataaagttttattggaacacagccaagcccattcctaaggaagggtctccggctctggaagaacaacaggagaaaccaagcaaccaaaccagaggccacgtgggccacagagcccagcaaaactactgtctagcccttcccagaaaacacttgccaagctctgttctatgggatcagggactctggtgaaaagtgtcttttgtgtaaaatgggaactgatagaactgcttctctgcttctctctaaaagggtcatttaaaagcacaaaagcacattcatgcattttcctctccacaattcgcaaaactggttttccattaaaaaaacaagcctgtgcctctatcaaaggccagagaacgcggcatctcaccgggaagagtttcctcacctgctgagttaaaggaacggggaacaattcttccaaaggccacagctctaagagggccctgagttctagacaggcccaccgaaatttggaggagcagaaaaagctcaggctacaaggacaggctcaaagcccaagcctcgacctccaaatccttcacaattgcagcacaaacgctttgcaaccgcacacaggttcagaaactactaggcttagaaaccccgcttccaagtgactgtgaaagcatccacatcaagggcctttgaaacaggccagtgagtccaggcggggagagcctcccttctgggaagactgaggagttccaggagccgggccgggtccagccagggccaccagctccagctcagatctgctgaggagcgggctccgtggggtgggggaagggaggtgtctcactggggaggtcgacttccttgctcagggtcacagaatggtagcaagcaagcgagttgaggactgtcaccaaccaggctcctgccctgagagcaagtctcattcttgggcaatcggactcaaatttccactgccgcgaagcactgcccccctccagggacaggcgtctcagggtgtatttacaaccagggttctggaaggggcaggaacacctgctctctcacgtccctctgacacatcctttgactccccaccctccggataaagctcacactcctcagcccgcccaggttaaagtccacgcaccccagcaccaagcgccttccacggcctggcttccaccagacaacctgtcatccagactaggaggctgaatgctctgccttcactctctgcctggggccactcgcaccactgccccctcctctgtgcccctgctccagcaaccctccacggcccaccccccgggcctccttggtggtgacatctttcagggtgtaaacccttccttccagcattattccaccctacactccagccacagcccaccccttgccaaccccaaataacctgccagctctcacacctcccagcccccgcttatgctgcttctggtgcttccaacacccttcccctcctgccgacccggcaaactcctactcatcattcagaacacctgcctcggggccgggcacggtggctcacgcctgtcatcccagcactttgggtggccgaagcaggtggatcacctgaggtctgaagttcgagaccagcctgaccaacatggtgaaacctcgtctctactaaaaaaaaaaaaaaaaaaatttagccaggagtggtggcatgcacctgtaatcccagctattcgggaggctgaggtgggagaattgcttgaaccgggaggcagaggttgcagtgagcctagatcatgccactgcactccagcctgggcgacagagcgagactccgtctcaaaaaaaaaaaatagatctgcttcggaaaagccttcccaggcaaactgagtccctctctccacagagttctgtgatctttcttccacctctggctttccccctccttccaaatgtctggggagctctaggtgcctggctgcagaatggggggagtccaaagggggctgacagagcagctgggggtaggactggggttctcagaaagcttccgagggggcccgacagccttgcagagaccaggggcatctcagggtaagagaaaagactagagagtgaagcgactgcaatgagctgcaggcttccccagcagccaggtcacaactggacggcgcactcatctggatgcgacacggtctgacatactttgaaagggtcacccctgctgtgtcgaggatggactggggatgtggtggacaaaggcagccacagcagagggatagcggtggggctggaggagtggagactgaggagccaggtggcggcgacgccttaagagtgagaactctgagggggtagtgaaggttaagggctgcatttgtggggctgctccaggttccattgcctgagccaccgaactcaggagagagggaagatttggaattaagaaaataaaagatgcagttatgacagtgcgatctcgtagactgtccccactagaacctgacactctttacatcaaatgacacacaatgaacataatgaaggcctgttggccctgggcgctggtcaccctggacagaacctccagaatccacaccatagtcggtcctccttctgcacacgaattccatcgtccaaggtcacggagtaaaagatggagcggggatccgaccccagtgcagggctggactcctggccgctccaggatgctgccagttactgggggacgcgcgggacgcctctgggttcccccaccgcaccccctagggtgaggttagcttagcaccgtgcccgttccgcctaaggggaaactgaggctcggagaggggtgggcagccgcctgctcaaggccacagagccggagagaggcgtccccggcggcaactggagaccccgaaacggagaagcagaaccggaggatggagggggcacaaatttcagacccggtgggaagtgagtggcgctgcagcggcggagggcctccgaggcggggaaaggagaggagccggggacagacccgcaaggtcacggccgagccccggcaccgccggccgacaacgcggggacggcggatccccgaggctggacccccaagacgggccgagcggggtcgttcctgcgcgtagcccggggacagagaggccgaagggccgcagcccgcggtgccgtcgggaccggtgccgcgctcacctgggccgcgaggagcagaaaggccgccaaaagccgcgccagcgcagccgccaccgctgccgccatgtcggccggtgcccgccgcaaccaacggcagatgtttcc

SEQ ID NO: 578 - DNA, 357 bp, Homo sapiens
aaagcccttacctcttaataccatcattttgagaattaaagtttgaaaatatgaattttggagggacacaaacatccagatcatagcacttgctaaggtttcataatgagtctgcatttgaatctttgtctgtttgactcaactgtctttccttgcagtcaagtgtgagttacctgttcctcctctattatccactctaacggcttctgtgtctctcttcagggaacctcagagtggcttcgtcactgattgcacatttacctttttgtagtatctgtctgtttgacttcataatgactaaaagcaacttgagacttctatatggttggaacctagcacagtgcataatattcaata

SEQ ID NO: 579 - DNA, 309 bp, Homo sapiens
ggggatggagggttctcgtattgcagtggcagcttccttgagcatggcagaggtctggtggctgggggttgttactagaagcctcacctgcagcctattcattcagcccttctgactagcttctatgccacttaaactgtggtaatacaaccctttcttaaacacggcaaaatgtgtctactgtctgtaactaagtcctaataaatgtagcgcttttccctcaaacagctattaatatgaagtcttcccagaacagagtacagtgggtctctactttcctcttatctagaaactaggtatctgtgaaca

SEQ ID NO: 580 - DNA, 356 bp, Homo sapiens
ctcgattgtcttttctgccctaccgtaaacctcatgggagcaggggctgtgactgttttaattcaccgttctgtgtacatcacccaacatagtgtctgtccggtggtgggccatcatcaaacagtggtagaaggaaaggagggagggaaaagagtattccaaaagttggtcaggtagagagaaggaaataatgtattataatgctttgagcagagtattaggatggggtcaggctctgtatgttattggagcacacattgtagcagttaacttggggtggggggtgatgtaatcagtaacactccgaaaagatgagcagccgggcgtgtggtcactcattacaggaatgacaccaa

SEQ ID NO: 581 - DNA, 246 bp, Homo sapiens
gagtctcactctgtcacccaggctggagtgcagtggtgcgatctcggctcactgcaacctctgcctcccaggtccaagtgattcttctgcctcagcctcctgagtagctgggattacaggtacccgccaccatgcctggctaatttttgtatttttagtagagacggggtttcaccatgttggccaggctggtctcgaactcctggcctcaagtgatccacccaccttggcctcccaaactgctgg

SEQ ID NO: 582 - DNA, 98 bp, Homo sapiens
cctgtaatcccagcactttgggaggccaaggcgggtggatcacttgaggtcaggagttcgagaccagcctggccaacatggtgaaaccccgtctctac

SEQ ID NO: 583 - DNA, 406 bp, Homo sapiens
gaagggctttcccctaagatcctagaaatcacaacaggaaggcaactatctattttgtccgccagtaaagtcaactgactgagtatgacagaaaattgggttgatctgatgttctcaaacatggccgtggaaatggccttgagagcagaaggtgtgttgaagactagtccaggcattccatcagtccaccagtgaatcagatacaactaggagcttccgtcacagaggagcttactgtagttacaaaaacagccagagtcagccgggcacagtggctcatgcctgtaatcccagcactttgggaggctgaggcaggtgaatcacctgaggtcaggaatttgagaccagcctggccaacatggtgaaatcctgtttctactaaaaattcccaaaaaaaaaaaaaaaa

SEQ ID NO: 584 - DNA, 882 bp, Homo sapiens
aaggcatggaataagttttgatcttgggtttactgctaacattgacttttcccgttagcccacctaggttctaaagagctagtatccagagctttgacacatggggtgccaggctttgtttctctgttaaaatcccccaaatttcctgactcctcagaacagctcagctcagctgggagtctgtggctgaggctggccgagacatcagcagagtacctggaatggaactccaagcaggtcgaagcttgggagccagtgtccttgcagtctgaatatttggggtggagagaggtaactctgttatgctcaccgctgggaccacagcaagaattcctttgccaccatttctctagtcaggcggagctgtccagggttcaggtggctttccaggacatgcttcaacttgcctggagatgggtggtgtgagcagatccctgggtgtctctctctggaggtaataatgacaaagaggtttagccactgagggagaaatgcatccccaggtctgaggggatatcccttttcttcaaacaatccctgggttgtttgtctacagtagaactctctttaataaaaaaaaaaaatgaaatgaaataaaaataaagtaaaagaacgcccatcttcagtataccaagcagcatgcagggcataatcgcctcaattcttggtatctggcacaatgttcagttggcagaaccacgctttctgtgggggtaataagcttaatatttagcctgcattactggggcagtggtgaagggagggggacaaaatgggagagagaccactgtagaaatggatattgaattccaagtattattgttggaatctctggagaaaatggctcctgaacatacaggattttcagtacagtttaaaaaa

SEQ ID NO: 585 - DNA, 312 bp, Homo sapiens
gtcctgggccgggcgcggtggctcacgcctgtaatcccagcactttgggaggccgaggcgggcggatcacgaggtcaggagatcgagacgatcccggctaaaacggtgaaaccccgtctctactaaaaatacaaaaaattagccgggcgtagtggcgggcgcctgtagtcccagctacttgggaggctgaggcaggagaatggcgtgaacccgggaggcggagcttgcagtgagccgagatcccgccactgcactccagcctgggggacagagcgagactccgtctcaaaaaaaaaaaaaaaaaagactgtc

SEQ ID NO: 586 - DNA, 322 bp, Homo sapiens
taattacaaaaaaatcggccaggcgcggtggctcacgcctgtaatcccagcactttgggaggccgaggcgggcggatcacgaggtcaggagatcgagaccatcccggctaaaacggtgaaaccccgtctctactaaaaatacaaaaaattagccgggcgtagtggcgggcgcctgtagtcccagccacttgggaggctgaggcaggagaatggcgtgaacccgggaggcggagcttgcagcgagccgagatcccgccactgcactccagcctgggcgacagagcgagactccatctcaaaaaaaaaaaaaaaaaaaaaaaaa

SEQ ID NO: 587 - DNA, 308 bp, Homo sapiens
caggccgggcgcggtggctcacgcctgtaatcccagcactttgggaggccgaggcgggcggatcacgaggtcaggagatcgagaccatcctggctaacacggtgaaaccccgtctctactaaaaatacaaaaaattagccgggcgtggtggtgggcgcctgtaatcccagctactcgggaggctgaggcaggagaatggcatgaacccaagaggcggagcttgcagtgagccgggatagcgccactgcagtccagcttgggcgaaagagtgagactccgtctcaaaaaaaaaaaaaagttgaataaac

SEQ ID NO: 588 - DNA, 306 bp, Homo sapiens
tttaggccgggcgcgggggctcacgcctgtaatcccagcactttgggaggccgaggcgggcggatcacgaggtcaggagatcgagaccatcccggctaaaacggtgaaacccgtctctactaaaaatacaaaaaattagccgggcgtagtggcgggcgcctgtagtcccagctacttgggaggctgaggcaggagaatggcgtgaacccgggaggcggagcttgcagtgagcggagatcccgccactgcactccagcctgggcggcagagcgagactccgtctcaaaaaaaaaaaataataataat

SEQ ID NO: 589 - DNA, 148 bp, Homo sapiens
gccaggcgcggtggctcacgcctgtaatcccagcactttgggaggccaaggcgggcagatcacgaggtcaggagatcgagaccatcctggctaacacggtgaaaccccgtctctactaaaaaatacaaaaaaaaaaaaaaaaaaaata

SEQ ID NO: 590 - DNA, 318 bp, Homo sapiens
gaaataggtgccgggcgcggtggctcacgcctgtaatcccagcactttgggaggccgaggcgggcggatcacgaggtcaggagatcaagaccatcccggctaaaaacggtgaaaccccgtctctactaaaaatacaaaaaattagctgggcgtagtggcgggcgcctgtagtcccagctacttgggaggctgaggcaggagaatggcgtgaacccgggaggcggagcttgcagtgagccgagatcccgccactgcactccagcctgggcgacagagcgagactccatctcaaaaaaaaaaaaaaagaaaggaaataag

SEQ ID NO: 591 - DNA, 289 bp, Homo sapiens
aggccgggcgcagtggctcacgcctgtaatcccagcactttgggaggccgaggagggtggatcacgaggtcaggagatcgagaccatcctggccaacatggtgaaaccccgtctctactacaaatacaaaaattagcagggcctggggcgggcgcctgtagtcccagctacttgggaggctgaggcgggagaatggcgtgaacccgggaggcggagcttgcagtgagccgagatcgcgcactgcactccagcctgggtgacagagcgagactccctctcagaataaata

SEQ ID NO: 592 - DNA, 142 bp, Homo sapiens
taaaggctgggcgcagtggctcacgcctgtaatcccagcactttgggaggccgaggcaggtggatcacgaggtcaggagattgagaccatcctggctaacatggtgaaaccccgtctctactaaaaatacaaaaaaaaaaaa

SEQ ID NO: 593 - DNA, 308 bp, Homo sapiens
ggtctgccaggcgcagtggctcacgactgtaatcccagcactttgggaggccgaggcgggcggatcacgaggtcaggagatcgagaccatcctggctaacacggtgaaacccggtctctactaaaaatacaaaaagttagccgggcgtggtggcgggcgcctgtagtcccatctactcgggaggctgaggcaggagaatggcgtgaacccgggaagtggagcttgcagtaagccgagatcgtgccactgcactccagtctgggcgacagagcgagactccgtctcagaaaataaacaaacaaaaaatc

SEQ ID NO: 594 - DNA, 142 bp, Homo sapiens
gggcagtggctcacacctgtaatcccagcactttgggaggccaaggcgggcggatcatgaggtcaggagatcgagaccatcctggctaacatggtgaaacctcgtctctactaaaaatacaaataattagccgggtgtggtg

SEQ ID NO: 595 - DNA, 322 bp, Homo sapiens
cggccgggcgcggtggctgacgcctgtaatcccagcactttgggaggccgaggcgggcggatcacgaggtcaggagatcgagaccatcctggctaacacggtgaaaccccgtctctactaaaaatacaaaaaattagccgggcgtggtagcgggcgcctgtagtcccagctactcgggaggctgaggcaggagaatggcgtgaacccgggaggcggagctttcagtgagccgagatcgcgccactgcactccagcctgggcgacagagcgagactccgtctcaaaaaaaaaaaaaaaaaaaaaaaaaaaaaaaaaaaaattc

SEQ ID NO: 596 - DNA, 306 bp, Homo sapiens
tggggccgggcgcagtggctcacgcctgtaatcccagcactttgggaggccgaggcgggcggatcacgaggtcaggagatcgagaccgtcctggctaacacggtgaaaccctgtctctactaaaaatacaaaaaattagccgggtgtggtggtgggcacctgtagtcccagctactcagagaggctgaggcaggagaatggcgtgaacccgggaggcggagcttgcagtgagccgagatcgcgccaccgcactccagcctgggcgacagagtgagaatccgtctcaaaaaaaaaaaaaaaaagact

SEQ ID NO: 597 - DNA, 307 bp, Homo sapiens
gccgggcgcggtggctcacgcctgtaatcccagcactttgggaggccgaggcgggcggatcatgaggtcaggagatcgagaccatcctggctaacacggtgaaaccccatctctactaaaaatacaaaaaattagccaggcgtggtggcgggcgcctgtagtcccagctactcgggaggctgaggcaggagaatggcgtgaacctgggaggcggagcttgcagtgagccgagatcgcgccactgaactccagcctgggcgacagagcgagactccgtctcaaaaagaaaataaaaaagaaaaatttc

SEQ ID NO: 598 - DNA, 308 bp, Homo sapiens
agggccgggcgcggtggctcatgcctgtaatcccagcactttgggaggccgaggcgggcggatcacgaggtcaggagatcgagaccatcctggctaacgtggtgaaaccccgtctctactaaaagtacaaataaaaaattagccgggcgtggcggtgggcgcctgtagtcccagctactcgggaggctgaggcaggagaatggcgtgaacccgggaggcggagcttgcagtgagccgagattgcgccactgcactccagcctgggcgacacagcaagactccgtctcaaaaaaaaaagttgaaaagct

SEQ ID NO: 599 - DNA, 303 bp, Homo sapiens
ataggctgggcgcggtggctcacgcctgtaatcccagcactttgggaggccgaggcaggcggatcatgaggtcaggagatcgagaccatcctggctaacacggtgaaacccagtctctactaaaaatacaaaaaattagctgggtgtgctggcaggcatctgtagtcccaactactcgggaggctgaggcgggagaatggcatgaacctgggaggcggagcttgcagtgagccgagatcacgccactgcactccagcctgggcgacagagtgagactacctctccaaaaaaaaaaaaaaaaaa

SEQ ID NO: 600 - DNA, 311 bp, Homo sapiens
agggataggccgggcgcggtggctcacgcctgtaatcccagcactttgggaggccgagacgggcggatcacgaggtcaggagatcgagaccatcctggctaacatggtgaaaccctgtctctactaaaaatacaaaaaaaattagccggttgtggtggcgagtgcctgtagtcccagctactccagaggctgaggcaggagaatggcatgaacccgggaggcagagcttgcagtgagccgagatcgtgccactgcacttgagcctgggcgacagagcaagactccatctcaaaaaaaaaaaaaaaaaaaaa

SEQ ID NO: 601 - DNA, 181 bp, Homo sapiens
aaagcaagcccgggcgcggtggctcacgcctgtaatcccagcactttgggaggccgaggcgggcggatcacgaggtcaggagatcgagaccatcctggctaacacggtgaaaccctgtctctactaaaaatacataaaaattagccgggcaaggtggcaggtgcctgtagtcccagctact

SEQ ID NO: 602 - DNA, 299 bp, Homo sapiens
ataggccaggcgcggtggctcacgcctgtaatcccagcactttgggaggccaaagcgggcggatcacgaggtcaggagatcgagaccatcctggctaacacggtgaaaccccgtctctactaaaaatacaaaaaattagcccgctgtggtggcgagcgcctgtagtcccagctacttgggaggctgaggcaggagaatggcatgaacccgggaggtggagcttgcagtgagccgagatcacaccaccgcactccagcctgggtgacagcacgagactccgtctcaaaaaaaagaaaaga

SEQ ID NO: 603 - DNA, 316 bp, Homo sapiens
tcagccggcgcggtggctcacgcctgtaatcccagcactttgggaggccgaggcgggcggatcacgaggtcaggagatcgagaccatcccggctaaaacggtgaaaccccgtctctactaaaaatacaaaaaattagccgggcgtagtggcgggcgcctgtggtcccagctacttgggaggctgaggcaggagaatggcgtgaacccgggaggcggagcttgcagtgagccgagatcccgccactgcactccagcctgggcgacagagcgagactccgtctcaaaaaaaaataaaataaaataaaaaaaaagaata

SEQ ID NO: 604 - DNA, 305 bp, Homo sapiens
gggcgcggtggctcacgcctgtaatcccagcactttgggaggccgaggcgggcggatcacgaggtcaggagatcgagaccatcccagctaaaacggtgaaaccccgtctctactaaaaatacaaaaaattagccgggcgtagtggcgggcacctgtagtcccagctacttgggaggctgaggcaggagaatggcgtgaacccgggaggcggagcttgcagtgagccgagatcccgccactgcactccagcctgggcgacagagcgagactccgtctcaaaaaaaaaaaaaaaaaaaaaaaagaaa

SEQ ID NO: 605 - DNA, 182 bp, Homo sapiens
ctgggcatggtggctcacgcctgtaatcccagcactttgggaggccaaggcgggcggatcacgaggtcaggagatcgagaccatcctggctaacatggtgaaaccccgtctctactaaaaattcaaaaaattagccaggcgcggtggcgggcacctgtagtcccagctactcagtaggctga

SEQ ID NO: 606 - DNA, 287 bp, Homo sapiens
acgcctgtaatcctagcactttgggaggccgaggcaggcggatcacgaggtcaggagatcgagaccatcctggtaacacggtgaaaccctgtctctactaaaaatacaaaaaaaatttgccgggcgtggtggcgggcacctgtagtcccagctactcgggaggctgaggcaggagaatggcgtgaatctgggaggctgagcctgcagtgagccgagatcgcgccactgcactccagcctgggcgacagagcaagactccatctcaaaaaaaaaaaaaaaagaaaaaa

SEQ ID NO: 607 - DNA, 316 bp, Homo sapiens
gaattcttggccgggcacggtggctcacgcctgtaatcccagcactttgggaggccgaggcgggcggatcacgaggtcaggagatcgagaccatcctggctaacacggtgaaaccccgtctctactaaaaatacaaaaaattagccgggcgtggtagcgggcgcctgtagtcccagctactcgggaggctgaggcaggagaatggcgtgaacctggcaggcggagcttgcagtgagccgagatcgcgccactgcactccagcctgggtgacagagcgagactccgtctcaaaaaaaaaaaaaaaaaaaaagaattc

SEQ ID NO: 608 - DNA, 310 bp, Homo sapiens
ggacgggcgcggtggctcacgcctgtaatcccagcactttgggaggccgaggcgggcggatcacgaggtcaggagatcgagaccatcccggctaaaacggtgaaaccccgtctctactaaaaatacaaaaaattagccgggcgtagtggcgggcgcctgtagtcccagctacttgggaggctgaggcaggagaatggcgtgaacccgggaggcggaggttgcagtgagccgagatcccgccactgcactccagcctgggcgacagagcgagactccgtctcaaaaaaaaaaaaaaaaaaaaaaaaaaaat

SEQ ID NO: 609 - DNA, 32174 bp, Homo sapiens
  misc_feature (1295): n equals a,t,g, or c
  misc_feature (1296): n equals a,t,g, or c
  misc_feature (1297): n equals a,t,g, or c
  misc_feature (1298): n equals a,t,g, or c
  misc_feature (1299): n equals a,t,g, or c
  misc_feature (1300): n equals a,t,g, or c
  misc_feature (1301): n equals a,t,g, or c
  misc_feature (1302): n equals a,t,g, or c
  misc_feature (1303): n equals a,t,g, or c
  misc_feature (1304): n equals a,t,g, or c
  misc_feature (1305): n equals a,t,g, or c
  misc_feature (1306): n equals a,t,g, or c
  misc_feature (1307): n equals a,t,g, or c
  misc_feature (1308): n equals a,t,g, or c
  misc_feature (1309): n equals a,t,g, or c
  misc_feature (1310): n equals a,t,g, or c
  misc_feature (1311): n equals a,t,g, or c
  misc_feature (1312): n equals a,t,g, or c
  misc_feature (1313): n equals a,t,g, or c
  misc_feature (1314): n equals a,t,g, or c
  misc_feature (1315): n equals a,t,g, or c
  misc_feature (1316): n equals a,t,g, or c
  misc_feature (1317): n equals a,t,g, or c
  misc_feature (1318): n equals a,t,g, or c
  misc_feature (1319): n equals a,t,g, or c
  misc_feature (1320): n equals a,t,g, or c
  misc_feature (1321): n equals a,t,g, or c
  misc_feature (1322): n equals a,t,g, or c
  misc_feature (1323): n equals a,t,g, or c
  misc_feature (1324): n equals a,t,g, or c
  misc_feature (1325): n equals a,t,g, or c
  misc_feature (1326): n equals a,t,g, or c
  misc_feature (1327): n equals a,t,g, or c
  misc_feature (1328): n equals a,t,g, or c
  misc_feature (1329): n equals a,t,g, or c
  misc_feature (1330): n equals a,t,g, or c
  misc_feature (1331): n equals a,t,g, or c
  misc_feature (1332): n equals a,t,g, or c
  misc_feature (1333): n equals a,t,g, or c
  misc_feature (1334): n equals a,t,g, or c
  misc_feature (1335): n equals a,t,g, or c
  misc_feature (1336): n equals a,t,g, or c
  misc_feature (1337): n equals a,t,g, or c
  misc_feature (1338): n equals a,t,g, or c
  misc_feature (1339): n equals a,t,g, or c
  misc_feature (1340): n equals a,t,g, or c
  misc_feature (1341): n equals a,t,g, or c
  misc_feature (1342): n equals a,t,g, or c
  misc_feature (1343): n equals a,t,g, or c
  misc_feature (1344): n equals a,t,g, or c
  misc_feature (1345): n equals a,t,g, or c
  misc_feature (1346): n equals a,t,g, or c
  misc_feature (1347): n equals a,t,g, or c
  misc_feature (1348): n equals a,t,g, or c
  misc_feature (1349): n equals a,t,g, or c
  misc_feature (1350): n equals a,t,g, or c
  misc_feature (1351): n equals a,t,g, or c
  misc_feature (1352): n equals a,t,g, or c
  misc_feature (1353): n equals a,t,g, or c
  misc_feature (1354): n equals a,t,g, or c
  misc_feature (1355): n equals a,t,g, or c
  misc_feature (1356): n equals a,t,g, or c
  misc_feature (1357): n equals a,t,g, or c
  misc_feature (1358): n equals a,t,g, or c
  misc_feature (1359): n equals a,t,g, or c
  misc_feature (1360): n equals a,t,g, or c
  misc_feature (1361): n equals a,t,g, or c
  misc_feature (1362): n equals a,t,g, or c
  misc_feature (1363): n equals a,t,g, or c
  misc_feature (1364): n equals a,t,g, or c
  misc_feature (1365): n equals a,t,g, or c
  misc_feature (1366): n equals a,t,g, or c
  misc_feature (1367): n equals a,t,g, or c
  misc_feature (1368): n equals a,t,g, or c
  misc_feature (1369): n equals a,t,g, or c
  misc_feature (1370): n equals a,t,g, or c
  misc_feature (1371): n equals a,t,g, or c
  misc_feature (1372): n equals a,t,g, or c
  misc_feature (1373): n equals a,t,g, or c
  misc_feature (1374): n equals a,t,g, or c
  misc_feature (1375): n equals a,t,g, or c
  misc_feature (1376): n equals a,t,g, or c
  misc_feature (1377): n equals a,t,g, or c
  misc_feature (1378): n equals a,t,g, or c
  misc_feature (1379): n equals a,t,g, or c
  misc_feature (1380): n equals a,t,g, or c
  misc_feature (1381): n equals a,t,g, or c
  misc_feature (1382): n equals a,t,g, or c
  misc_feature (1383): n equals a,t,g, or c
  misc_feature (1384): n equals a,t,g, or c
  misc_feature (1385): n equals a,t,g, or c
  misc_feature (1386): n equals a,t,g, or c
  misc_feature (1387): n equals a,t,g, or c
  misc_feature (1388): n equals a,t,g, or c
  misc_feature (1389): n equals a,t,g, or c
  misc_feature (1390): n equals a,t,g, or c
  misc_feature (1391): n equals a,t,g, or c
  misc_feature (1392): n equals a,t,g, or c
  misc_feature (1393): n equals a,t,g, or c
  misc_feature (1394): n equals a,t,g, or c
  misc_feature (1395): n equals a,t,g, or c
  misc_feature (1396): n equals a,t,g, or c
  misc_feature (1397): n equals a,t,g, or c
  misc_feature (1398): n equals a,t,g, or c
  misc_feature (1399): n equals a,t,g, or c
  misc_feature (1400): n equals a,t,g, or c
  misc_feature (1401): n equals a,t,g, or c
  misc_feature (1402): n equals a,t,g, or c
  misc_feature (1403): n equals a,t,g, or c
  misc_feature (1404): n equals a,t,g, or c
  misc_feature (1405): n equals a,t,g, or c
  misc_feature (1406): n equals a,t,g, or c
  misc_feature (1407): n equals a,t,g, or c
  misc_feature (1408): n equals a,t,g, or c
  misc_feature (1409): n equals a,t,g, or c
  misc_feature (1410): n equals a,t,g, or c
  misc_feature (1411): n equals a,t,g, or c
  misc_feature (1412): n equals a,t,g, or c
  misc_feature (1413): n equals a,t,g, or c
  misc_feature (1414): n equals a,t,g, or c
  misc_feature (1415): n equals a,t,g, or c
  misc_feature (1416): n equals a,t,g, or c
  misc_feature (1417): n equals a,t,g, or c
  misc_feature (1418): n equals a,t,g, or c
  misc_feature (1419): n equals a,t,g, or c
  misc_feature (1420): n equals a,t,g, or c
  misc_feature (1421): n equals a,t,g, or c
  misc_feature (1422): n equals a,t,g, or c
  misc_feature (1423): n equals a,t,g, or c
  misc_feature (1424): n equals a,t,g, or c
  misc_feature (1425): n equals a,t,g, or c
  misc_feature (1426): n equals a,t,g, or c
  misc_feature (1427): n equals a,t,g, or c
  misc_feature (1428): n equals a,t,g, or c
  misc_feature (1429): n equals a,t,g, or c
  misc_feature (1430): n equals a,t,g, or c
  misc_feature (1431): n equals a,t,g, or c
  misc_feature (1432): n equals a,t,g, or c
  misc_feature (1433): n equals a,t,g, or c
  misc_feature (1434): n equals a,t,g, or c
  misc_feature (1435): n equals a,t,g, or c
  misc_feature (1436): n equals a,t,g, or c
  misc_feature (1437): n equals a,t,g, or c
  misc_feature (1438): n equals a,t,g, or c
  misc_feature (1439): n equals a,t,g, or c
  misc_feature (1440): n equals a,t,g, or c
  misc_feature (1441): n equals a,t,g, or c
  misc_feature (1442): n equals a,t,g, or c
  misc_feature (1443): n equals a,t,g, or c
  misc_feature (1444): n equals a,t,g, or c
  misc_feature (1445): n equals a,t,g, or c
  misc_feature (1446): n equals a,t,g, or c
  misc_feature (1447): n equals a,t,g, or c
  misc_feature (1448): n equals a,t,g, or c
  misc_feature (1449): n equals a,t,g, or c
  misc_feature (1450): n equals a,t,g, or c
  misc_feature (1451): n equals a,t,g, or c
  misc_feature (1452): n equals a,t,g, or c
  misc_feature (1453): n equals a,t,g, or c
  misc_feature (1454): n equals a,t,g, or c
  misc_feature (1455): n equals a,t,g, or c
  misc_feature (1456): n equals a,t,g, or c
  misc_feature (1457): n equals a,t,g, or c
  misc_feature (1458): n equals a,t,g, or c
  misc_feature (1459): n equals a,t,g, or c
  misc_feature (1460): n equals a,t,g, or c
  misc_feature (1461): n equals a,t,g, or c
  misc_feature (1462): n equals a,t,g, or c
  misc_feature (1463): n equals a,t,g, or c
  misc_feature (1464): n equals a,t,g, or c
  misc_feature (1465): n equals a,t,g, or c
  misc_feature (1466): n equals a,t,g, or c
  misc_feature (1467): n equals a,t,g, or c
  misc_feature (1468): n equals a,t,g, or c
  misc_feature (1469): n equals a,t,g, or c
  misc_feature (1470): n equals a,t,g, or c
  misc_feature (1471): n equals a,t,g, or c
  misc_feature (1472): n equals a,t,g, or c
  misc_feature (1473): n equals a,t,g, or c
  misc_feature (1474): n equals a,t,g, or c
  misc_feature (1475): n equals a,t,g, or c
  misc_feature (1476): n equals a,t,g, or c
  misc_feature (1477): n equals a,t,g, or c
  misc_feature (1478): n equals a,t,g, or c
  misc_feature (1479): n equals a,t,g, or c
  misc_feature (1480): n equals a,t,g, or c
  misc_feature (1481): n equals a,t,g, or c
  misc_feature (1482): n equals a,t,g, or c
  misc_feature (1483): n equals a,t,g, or c
  misc_feature (1484): n equals a,t,g, or c
  misc_feature (1485): n equals a,t,g, or c
  misc_feature (1486): n equals a,t,g, or c
  misc_feature (1487): n equals a,t,g, or c
  misc_feature (1488): n equals a,t,g, or c
  misc_feature (1489): n equals a,t,g, or c
  misc_feature (1490): n equals a,t,g, or c
  misc_feature (1491): n equals a,t,g, or c
  misc_feature (1492): n equals a,t,g, or c
  misc_feature (1493): n equals a,t,g, or c
  misc_feature (1494): n equals a,t,g, or c
  misc_feature (1495): n equals a,t,g, or c
  misc_feature (1496): n equals a,t,g, or c
  misc_feature (1497): n equals a,t,g, or c
  misc_feature (1498): n equals a,t,g, or c
  misc_feature (1499): n equals a,t,g, or c
  misc_feature (1500): n equals a,t,g, or c
  misc_feature (1501): n equals a,t,g, or c
  misc_feature (1502): n equals a,t,g, or c
  misc_feature (1503): n equals a,t,g, or c
  misc_feature (1504): n equals a,t,g, or c
  misc_feature (1505): n equals a,t,g, or c
  misc_feature (1506): n equals a,t,g, or c
  misc_feature (1507): n equals a,t,g, or c
  misc_feature (1508): n equals a,t,g, or c
  misc_feature (1509): n equals a,t,g, or c
  misc_feature (1510): n equals a,t,g, or c
  misc_feature (1511): n equals a,t,g, or c
  misc_feature (1512): n equals a,t,g, or c
  misc_feature (1513): n equals a,t,g, or c
  misc_feature (1514): n equals a,t,g, or c
  misc_feature (1515): n equals a,t,g, or c
  misc_feature (1516): n equals a,t,g, or c
  misc_feature (1517): n equals a,t,g, or c
  misc_feature (1518): n equals a,t,g, or c
  misc_feature (1519): n equals a,t,g, or c
  misc_feature (1520): n equals a,t,g, or c
  misc_feature (1521): n equals a,t,g, or c
  misc_feature (1522): n equals a,t,g, or c
  misc_feature (1523): n equals a,t,g, or c
  misc_feature (1524): n equals a,t,g, or c
  misc_feature (1525): n equals a,t,g, or c
  misc_feature (1526): n equals a,t,g, or c
  misc_feature (1527): n equals a,t,g, or c
  misc_feature (1528): n equals a,t,g, or c
  misc_feature (1529): n equals a,t,g, or c
  misc_feature (1530): n equals a,t,g, or c
  misc_feature (1531): n equals a,t,g, or c
  misc_feature (1532): n equals a,t,g, or c
  misc_feature (1533): n equals a,t,g, or c
  misc_feature (1534): n equals a,t,g, or c
  misc_feature (1535): n equals a,t,g, or c
  misc_feature (1536): n equals a,t,g, or c
  misc_feature (1537): n equals a,t,g, or c
  misc_feature (1538): n equals a,t,g, or c
  misc_feature (1539): n equals a,t,g, or c
  misc_feature (1540): n equals a,t,g, or c
  misc_feature (1541): n equals a,t,g, or c
  misc_feature (1542): n equals a,t,g, or c
  misc_feature (1543): n equals a,t,g, or c
  misc_feature (1544): n equals a,t,g, or c
  misc_feature (1545): n equals a,t,g, or c
  misc_feature (1546): n equals a,t,g, or c
  misc_feature (1547): n equals a,t,g, or c
  misc_feature (1548): n equals a,t,g, or c
  misc_feature (1549): n equals a,t,g, or c
  misc_feature (1550): n equals a,t,g, or c
  misc_feature (1551): n equals a,t,g, or c
  misc_feature (1552): n equals a,t,g, or c
  misc_feature (1553): n equals a,t,g, or c
  misc_feature (1554): n equals a,t,g, or c
  misc_feature (1555): n equals a,t,g, or c
  misc_feature (1556): n equals a,t,g, or c
  misc_feature (1557): n equals a,t,g, or c
  misc_feature (1558): n equals a,t,g, or c
  misc_feature (1559): n equals a,t,g, or c
  misc_feature (1560): n equals a,t,g, or c
  misc_feature (1561): n equals a,t,g, or c
  misc_feature (1562): n equals a,t,g, or c
  misc_feature (1563): n equals a,t,g, or c
  misc_feature (1564): n equals a,t,g, or c
  misc_feature (1565): n equals a,t,g, or c
  misc_feature (1566): n equals a,t,g, or c
  misc_feature (1567): n equals a,t,g, or c
  misc_feature (1568): n equals a,t,g, or c
  misc_feature (1569): n equals a,t,g, or c
  misc_feature (1570): n equals a,t,g, or c
  misc_feature (1571): n equals a,t,g, or c
  misc_feature (1572): n equals a,t,g, or c
  misc_feature (1573): n equals a,t,g, or c
  misc_feature (1574): n equals a,t,g, or c
  misc_feature (1575): n equals a,t,g, or c
  misc_feature (1576): n equals a,t,g, or c
  misc_feature (1577): n equals a,t,g, or c
  misc_feature (1578): n equals a,t,g, or c
  misc_feature (1579): n equals a,t,g, or c
  misc_feature (1580): n equals a,t,g, or c
  misc_feature (1581): n equals a,t,g, or c
  misc_feature (1582): n equals a,t,g, or c
  misc_feature (1583): n equals a,t,g, or c
  misc_feature (1584): n equals a,t,g, or c
  misc_feature (1585): n equals a,t,g, or c
  misc_feature (1586): n equals a,t,g, or c
  misc_feature (1587): n equals a,t,g, or c
  misc_feature (1588): n equals a,t,g, or c
  misc_feature (1589): n equals a,t,g, or c
  misc_feature (1590): n equals a,t,g, or c
  misc_feature (1591): n equals a,t,g, or c
  misc_feature (1592): n equals a,t,g, or c
  misc_feature (1593): n equals a,t,g, or c
  misc_feature (1594): n equals a,t,g, or c
  misc_feature (1595): n equals a,t,g, or c
  misc_feature (1596): n equals a,t,g, or c
  misc_feature (1597): n equals a,t,g, or c
  misc_feature (1598): n equals a,t,g, or c
  misc_feature (1599): n equals a,t,g, or c
  misc_feature (1600): n equals a,t,g, or c
  misc_feature (1601): n equals a,t,g, or c
  misc_feature (1602): n equals a,t,g, or c
  misc_feature (1603): n equals a,t,g, or c
  misc_feature (1604): n equals a,t,g, or c
  misc_feature (1605): n equals a,t,g, or c
  misc_feature (1606): n equals a,t,g, or c
  misc_feature (1607): n equals a,t,g, or c
  misc_feature (1608): n equals a,t,g, or c
  misc_feature (1609): n equals a,t,g, or c
  misc_feature (1610): n equals a,t,g, or c
  misc_feature (1611): n equals a,t,g, or c
  misc_feature (1612): n equals a,t,g, or c
  misc_feature (1613): n equals a,t,g, or c
  misc_feature (1614): n equals a,t,g, or c
  misc_feature (1615): n equals a,t,g, or c
  misc_feature (1616): n equals a,t,g, or c
  misc_feature (1617): n equals a,t,g, or c
  misc_feature (1618): n equals a,t,g, or c
  misc_feature (1619): n equals a,t,g, or c
  misc_feature (1620): n equals a,t,g, or c
  misc_feature (1621): n equals a,t,g, or c
  misc_feature (1622): n equals a,t,g, or c
  misc_feature (1623): n equals a,t,g, or c
  misc_feature (1624): n equals a,t,g, or c
  misc_feature (1625): n equals a,t,g, or c
  misc_feature (1626): n equals a,t,g, or c
  misc_feature (1627): n equals a,t,g, or c
  misc_feature (1628): n equals a,t,g, or c
  misc_feature (1629): n equals a,t,g, or c
  misc_feature (1630): n equals a,t,g, or c
  misc_feature (1631): n equals a,t,g, or c
  misc_feature (1632): n equals a,t,g, or c
  misc_feature (1633): n equals a,t,g, or c
  misc_feature (1634): n equals a,t,g, or c
  misc_feature (1635): n equals a,t,g, or c
  misc_feature (1636): n equals a,t,g, or c
  misc_feature (1637): n equals a,t,g, or c
  misc_feature (1638): n equals a,t,g, or c
  misc_feature (1639): n equals a,t,g, or c
  misc_feature (1640): n equals a,t,g, or c
  misc_feature (1641): n equals a,t,g, or c
  misc_feature (1642): n equals a,t,g, or c
  misc_feature (1643): n equals a,t,g, or c
  misc_feature (1644): n equals a,t,g, or c
  misc_feature (1645): n equals a,t,g, or c
  misc_feature (1646): n equals a,t,g, or c
  misc_feature (1647): n equals a,t,g, or c
  misc_feature (1648): n equals a,t,g, or c
  misc_feature (1649): n equals a,t,g, or c
  misc_feature (1650): n equals a,t,g, or c
  misc_feature (1651): n equals a,t,g, or c
  misc_feature (1652): n equals a,t,g, or c
  misc_feature (1653): n equals a,t,g, or c
  misc_feature (1654): n equals a,t,g, or c
  misc_feature (1655): n equals a,t,g, or c
  misc_feature (1656): n equals a,t,g, or c
  misc_feature (1657): n equals a,t,g, or c
  misc_feature (1658): n equals a,t,g, or c
  misc_feature (1659): n equals a,t,g, or c
  misc_feature (1660): n equals a,t,g, or c
  misc_feature (1661): n equals a,t,g, or c
  misc_feature (1662): n equals a,t,g, or c
  misc_feature (1663): n equals a,t,g, or c
  misc_feature (1664): n equals a,t,g, or c
  misc_feature (1665): n equals a,t,g, or c
  misc_feature (1666): n equals a,t,g, or c
  misc_feature (1667): n equals a,t,g, or c
  misc_feature (1668): n equals a,t,g, or c
  misc_feature (1669): n equals a,t,g, or c
  misc_feature (1670): n equals a,t,g, or c
  misc_feature (1671): n equals a,t,g, or c
  misc_feature (1672): n equals a,t,g, or c
  misc_feature (1673): n equals a,t,g, or c
  misc_feature (1674): n equals a,t,g, or c
  misc_feature (1675): n equals a,t,g, or c
  misc_feature (1676): n equals a,t,g, or c
  misc_feature (1677): n equals a,t,g, or c
  misc_feature (1678): n equals a,t,g, or c
  misc_feature (1679): n equals a,t,g, or c
  misc_feature (1680): n equals a,t,g, or c
  misc_feature (1681): n equals a,t,g, or c
  misc_feature (1682): n equals a,t,g, or c
  misc_feature (1683): n equals a,t,g, or c
  misc_feature (1684): n equals a,t,g, or c
  misc_feature (1685): n equals a,t,g, or c
  misc_feature (1686): n equals a,t,g, or c
  misc_feature (1687): n equals a,t,g, or c
  misc_feature (1688): n equals a,t,g, or c
  misc_feature (1689): n equals a,t,g, or c
  misc_feature (1690): n equals a,t,g, or c
  misc_feature (1691): n equals a,t,g, or c
  misc_feature (1692): n equals a,t,g, or c
  misc_feature (1693): n equals a,t,g, or c
  misc_feature (1694): n equals a,t,g, or c
  misc_feature (1695): n equals a,t,g, or c
  misc_feature (1696): n equals a,t,g, or c
  misc_feature (1697): n equals a,t,g, or c
  misc_feature (1698): n equals a,t,g, or c
  misc_feature (1699): n equals a,t,g, or c
  misc_feature (1700): n equals a,t,g, or c
  misc_feature (1701): n equals a,t,g, or c
  misc_feature (1702): n equals a,t,g, or c
  misc_feature (1703): n equals a,t,g, or c
  misc_feature (1704): n equals a,t,g, or c
  misc_feature (1705): n equals a,t,g, or c
  misc_feature (1706): n equals a,t,g, or c
  misc_feature (1707): n equals a,t,g, or c
  misc_feature (1708): n equals a,t,g, or c
  misc_feature (1709): n equals a,t,g, or c
  misc_feature (1710): n equals a,t,g, or c
  misc_feature (1711): n equals a,t,g, or c
  misc_feature (1712): n equals a,t,g, or c
  misc_feature (1713): n equals a,t,g, or c
  misc_feature (1714): n equals a,t,g, or c
  misc_feature (1715): n equals a,t,g, or c
  misc_feature (1716): n equals a,t,g, or c
  misc_feature (1717): n equals a,t,g, or c
  misc_feature (1718): n equals a,t,g, or c
  misc_feature (1719): n equals a,t,g, or c
  misc_feature (1720): n equals a,t,g, or c
  misc_feature (1721): n equals a,t,g, or c
  misc_feature (1722): n equals a,t,g, or c
  misc_feature (1723): n equals a,t,g, or c
  misc_feature (1724): n equals a,t,g, or c
  misc_feature (1725): n equals a,t,g, or c
  misc_feature (1726): n equals a,t,g, or c
  misc_feature (1727): n equals a,t,g, or c
  misc_feature (1728): n equals a,t,g, or c
  misc_feature (1729): n equals a,t,g, or c
  misc_feature (1730): n equals a,t,g, or c
  misc_feature (1731): n equals a,t,g, or c
  misc_feature (1732): n equals a,t,g, or c
  misc_feature (1733): n equals a,t,g, or c
  misc_feature (1734): n equals a,t,g, or c
  misc_feature (1735): n equals a,t,g, or c
  misc_feature (1736): n equals a,t,g, or c
  misc_feature (1737): n equals a,t,g, or c
  misc_feature (1738): n equals a,t,g, or c
  misc_feature (1739): n equals a,t,g, or c
  misc_feature (1740): n equals a,t,g, or c
  misc_feature (1741): n equals a,t,g, or c
  misc_feature (1742): n equals a,t,g, or c
  misc_feature (1743): n equals a,t,g, or c
  misc_feature (1744): n equals a,t,g, or c
  misc_feature (1745): n equals a,t,g, or c
  misc_feature (1746): n equals a,t,g, or c
  misc_feature (1747): n equals a,t,g, or c
  misc_feature (1748): n equals a,t,g, or c
  misc_feature (1749): n equals a,t,g, or c
  misc_feature (1750): n equals a,t,g, or c
  misc_feature (1751): n equals a,t,g, or c
  misc_feature (1752): n equals a,t,g, or c
  misc_feature (1753): n equals a,t,g, or c
  misc_feature (1754): n equals a,t,g, or c
  misc_feature (1755): n equals a,t,g, or c
  misc_feature (1756): n equals a,t,g, or c
  misc_feature (1757): n equals a,t,g, or c
  misc_feature (1758): n equals a,t,g, or c
  misc_feature (1759): n equals a,t,g, or c
  misc_feature (1760): n equals a,t,g, or c
  misc_feature (1761): n equals a,t,g, or c
  misc_feature (1762): n equals a,t,g, or c
  misc_feature (1763): n equals a,t,g, or c
  misc_feature (1764): n equals a,t,g, or c
  misc_feature (1765): n equals a,t,g, or c
  misc_feature (1766): n equals a,t,g, or c
  misc_feature (1767): n equals a,t,g, or c
  misc_feature (1768): n equals a,t,g, or c
  misc_feature (1769): n equals a,t,g, or c
  misc_feature (1770): n equals a,t,g, or c
  misc_feature (1771): n equals a,t,g, or c
  misc_feature (1772): n equals a,t,g, or c
  misc_feature (1773): n equals a,t,g, or c
  misc_feature (1774): n equals a,t,g, or c
  misc_feature (1775): n equals a,t,g, or c
  misc_feature (1776): n equals a,t,g, or c
  misc_feature (1777): n equals a,t,g, or c
  misc_feature (1778): n equals a,t,g, or c
  misc_feature (1779): n equals a,t,g, or c
  misc_feature (1780): n equals a,t,g, or c
  misc_feature (1781): n equals a,t,g, or c
  misc_feature (1782): n equals a,t,g, or c
  misc_feature (1783): n equals a,t,g, or c
  misc_feature (1784): n equals a,t,g, or c
  misc_feature (1785): n equals a,t,g, or c
  misc_feature (1786): n equals a,t,g, or c
  misc_feature (1787): n equals a,t,g, or c
  misc_feature (1788): n equals a,t,g, or c
  misc_feature (1789): n equals a,t,g, or c
  misc_feature (1790): n equals a,t,g, or c
  misc_feature (1791): n equals a,t,g, or c
  misc_feature (1792): n equals a,t,g, or c
  misc_feature (1793): n equals a,t,g, or c
  misc_feature (1794): n equals a,t,g, or c
  misc_feature (1795): n equals a,t,g, or c
  misc_feature (1796): n equals a,t,g, or c
  misc_feature (1797): n equals a,t,g, or c
  misc_feature (1798): n equals a,t,g, or c
  misc_feature (1799): n equals a,t,g, or c
  misc_feature (1800): n equals a,t,g, or c
  misc_feature (1801): n equals a,t,g, or c
  misc_feature (1802): n equals a,t,g, or c
  misc_feature (1803): n equals a,t,g, or c
  misc_feature (1804): n equals a,t,g, or c
  misc_feature (1805): n equals a,t,g, or c
  misc_feature (1806): n equals a,t,g, or c
  misc_feature (1807): n equals a,t,g, or c
  misc_feature (1808): n equals a,t,g, or c
  misc_feature (1809): n equals a,t,g, or c
  misc_feature (1810): n equals a,t,g, or c
  misc_feature (1811): n equals a,t,g, or c
  misc_feature (1812): n equals a,t,g, or c
  misc_feature (1813): n equals a,t,g, or c
  misc_feature (1814): n equals a,t,g, or c
  misc_feature (1815): n equals a,t,g, or c
  misc_feature (1816): n equals a,t,g, or c
  misc_feature (1817): n equals a,t,g, or c
  misc_feature (1818): n equals a,t,g, or c
  misc_feature (1819): n equals a,t,g, or c
  misc_feature (1820): n equals a,t,g, or c
  misc_feature (1821): n equals a,t,g, or c
  misc_feature (1822): n equals a,t,g, or c
  misc_feature (1823): n equals a,t,g, or c
  misc_feature (1824): n equals a,t,g, or c
  misc_feature (1825): n equals a,t,g, or c
  misc_feature (1826): n equals a,t,g, or c
  misc_feature (1827): n equals a,t,g, or c
  misc_feature (1828): n equals a,t,g, or c
  misc_feature (1829): n equals a,t,g, or c
  misc_feature (1830): n equals a,t,g, or c
  misc_feature (1831): n equals a,t,g, or c
  misc_feature (1832): n equals a,t,g, or c
  misc_feature (1833): n equals a,t,g, or c
  misc_feature (1834): n equals a,t,g, or c
  misc_feature (1835): n equals a,t,g, or c
  misc_feature (1836): n equals a,t,g, or c
  misc_feature (1837): n equals a,t,g, or c
  misc_feature (1838): n equals a,t,g, or c
  misc_feature (1839): n equals a,t,g, or c
  misc_feature (1840): n equals a,t,g, or c
  misc_feature (1841): n equals a,t,g, or c
  misc_feature (1842): n equals a,t,g, or c
  misc_feature (1843): n equals a,t,g, or c
  misc_feature (1844): n equals a,t,g, or c
  misc_feature (1845): n equals a,t,g, or c
  misc_feature (1846): n equals a,t,g, or c
  misc_feature (1847): n equals a,t,g, or c
  misc_feature (1848): n equals a,t,g, or c
  misc_feature (1849): n equals a,t,g, or c
  misc_feature (1850): n equals a,t,g, or c
  misc_feature (1851): n equals a,t,g, or c
  misc_feature (1852): n equals a,t,g, or c
  misc_feature (1853): n equals a,t,g, or c
  misc_feature (1854): n equals a,t,g, or c
  misc_feature (1855): n equals a,t,g, or c
  misc_feature (1856): n equals a,t,g, or c
  misc_feature (1857): n equals a,t,g, or c
  misc_feature (1858): n equals a,t,g, or c
  misc_feature (1859): n equals a,t,g, or c
  misc_feature (1860): n equals a,t,g, or c
  misc_feature (1861): n equals a,t,g, or c
  misc_feature (1862): n equals a,t,g, or c
  misc_feature (1863): n equals a,t,g, or c
  misc_feature (1864): n equals a,t,g, or c
  misc_feature (1865): n equals a,t,g, or c
  misc_feature (1866): n equals a,t,g, or c
  misc_feature (1867): n equals a,t,g, or c
  misc_feature (1868): n equals a,t,g, or c
  misc_feature (1869): n equals a,t,g, or c
  misc_feature (1870): n equals a,t,g, or c
  misc_feature (1871): n equals a,t,g, or c
  misc_feature (1872): n equals a,t,g, or c
  misc_feature (1873): n equals a,t,g, or c
  misc_feature (1874): n equals a,t,g, or c
  misc_feature (1875): n equals a,t,g, or c
  misc_feature (1876): n equals a,t,g, or c
  misc_feature (1877): n equals a,t,g, or c
  misc_feature (1878): n equals a,t,g, or c
  misc_feature (1879): n equals a,t,g, or c
  misc_feature (1880): n equals a,t,g, or c
  misc_feature (1881): n equals a,t,g, or c
  misc_feature (1882): n equals a,t,g, or c
  misc_feature (1883): n equals a,t,g, or c
  misc_feature (1884): n equals a,t,g, or c
  misc_feature (1885): n equals a,t,g, or c
  misc_feature (1886): n equals a,t,g, or c
  misc_feature (1887): n equals a,t,g, or c
  misc_feature (1888): n equals a,t,g, or c
  misc_feature (1889): n equals a,t,g, or c
  misc_feature (1890): n equals a,t,g, or c
  misc_feature (1891): n equals a,t,g, or c
  misc_feature (1892): n equals a,t,g, or c
  misc_feature (1893): n equals a,t,g, or c
  misc_feature (1894): n equals a,t,g, or c
  misc_feature (1895): n equals a,t,g, or c
  misc_feature (1896): n equals a,t,g, or c
  misc_feature (1897): n equals a,t,g, or c
  misc_feature (1898): n equals a,t,g, or c
  misc_feature (1899): n equals a,t,g, or c
  misc_feature (1900): n equals a,t,g, or c
  misc_feature (1901): n equals a,t,g, or c
  misc_feature (1902): n equals a,t,g, or c
  misc_feature (1903): n equals a,t,g, or c
  misc_feature (1904): n equals a,t,g, or c
  misc_feature (1905): n equals a,t,g, or c
  misc_feature (1906): n equals a,t,g, or c
  misc_feature (1907): n equals a,t,g, or c
  misc_feature (1908): n equals a,t,g, or c
  misc_feature (1909): n equals a,t,g, or c
  misc_feature (1910): n equals a,t,g, or c
  misc_feature (1911): n equals a,t,g, or c
  misc_feature (1912): n equals a,t,g, or c
  misc_feature (1913): n equals a,t,g, or c
  misc_feature (1914): n equals a,t,g, or c
  misc_feature (1915): n equals a,t,g, or c
  misc_feature (1916): n equals a,t,g, or c
  misc_feature (1917): n equals a,t,g, or c
  misc_feature (1918): n equals a,t,g, or c
  misc_feature (1919): n equals a,t,g, or c
  misc_feature (1920): n equals a,t,g, or c
  misc_feature (1921): n equals a,t,g, or c
  misc_feature (1922): n equals a,t,g, or c
  misc_feature (1923): n equals a,t,g, or c
  misc_feature (1924): n equals a,t,g, or c
  misc_feature (1925): n equals a,t,g, or c
  misc_feature (1926): n equals a,t,g, or c
  misc_feature (1927): n equals a,t,g, or c
  misc_feature (1928): n equals a,t,g, or c
  misc_feature (1929): n equals a,t,g, or c
  misc_feature (1930): n equals a,t,g, or c
  misc_feature (1931): n equals a,t,g, or c
  misc_feature (1932): n equals a,t,g, or c
  misc_feature (1933): n equals a,t,g, or c
  misc_feature (1934): n equals a,t,g, or c
  misc_feature (1935): n equals a,t,g, or c
  misc_feature (1936): n equals a,t,g, or c
  misc_feature (1937): n equals a,t,g, or c
  misc_feature (1938): n equals a,t,g, or c
  misc_feature (1939): n equals a,t,g, or c
  misc_feature (1940): n equals a,t,g, or c
  misc_feature (1941): n equals a,t,g, or c
  misc_feature (1942): n equals a,t,g, or c
  misc_feature (1943): n equals a,t,g, or c
  misc_feature (1944): n equals a,t,g, or c
  misc_feature (1945): n equals a,t,g, or c
  misc_feature (1946): n equals a,t,g, or c
  misc_feature (1947): n equals a,t,g, or c
  misc_feature (1948): n equals a,t,g, or c
  misc_feature (1949): n equals a,t,g, or c
  misc_feature (1950): n equals a,t,g, or c
  misc_feature (1951): n equals a,t,g, or c
  misc_feature (1952): n equals a,t,g, or c
  misc_feature (1953): n equals a,t,g, or c
  misc_feature (1954): n equals a,t,g, or c
  misc_feature (1955): n equals a,t,g, or c
  misc_feature (1956): n equals a,t,g, or c
  misc_feature (1957): n equals a,t,g, or c
  misc_feature (1958): n equals a,t,g, or c
  misc_feature (1959): n equals a,t,g, or c
  misc_feature (1960): n equals a,t,g, or c
  misc_feature (1961): n equals a,t,g, or c
  misc_feature (1962): n equals a,t,g, or c
  misc_feature (1963): n equals a,t,g, or c
  misc_feature (1964): n equals a,t,g, or c
  misc_feature (1965): n equals a,t,g, or c
  misc_feature (1966): n equals a,t,g, or c
  misc_feature (1967): n equals a,t,g, or c
  misc_feature (1968): n equals a,t,g, or c
  misc_feature (1969): n equals a,t,g, or c
  misc_feature (1970): n equals a,t,g, or c
  misc_feature (1971): n equals a,t,g, or c
  misc_feature (1972): n equals a,t,g, or c
  misc_feature (1973): n equals a,t,g, or c
  misc_feature (1974): n equals a,t,g, or c
  misc_feature (1975): n equals a,t,g, or c
  misc_feature (1976): n equals a,t,g, or c
  misc_feature (1977): n equals a,t,g, or c
  misc_feature (1978): n equals a,t,g, or c
  misc_feature (1979): n equals a,t,g, or c
  misc_feature (1980): n equals a,t,g, or c
  misc_feature (1981): n equals a,t,g, or c
  misc_feature (1982): n equals a,t,g, or c
  misc_feature (1983): n equals a,t,g, or c
  misc_feature (1984): n equals a,t,g, or c
  misc_feature (1985): n equals a,t,g, or c
  misc_feature (1986): n equals a,t,g, or c
  misc_feature (1987): n equals a,t,g, or c
  misc_feature (1988): n equals a,t,g, or c
  misc_feature (1989): n equals a,t,g, or c
  misc_feature (1990): n equals a,t,g, or c
  misc_feature (1991): n equals a,t,g, or c
  misc_feature (1992): n equals a,t,g, or c
  misc_feature (1993): n equals a,t,g, or c
  misc_feature (1994): n equals a,t,g, or c
  misc_feature (1995): n equals a,t,g, or c
  misc_feature (1996): n equals a,t,g, or c
  misc_feature (1997): n equals a,t,g, or c
  misc_feature (1998): n equals a,t,g, or c
  misc_feature (1999): n equals a,t,g, or c
  misc_feature (2000): n equals a,t,g, or c
  misc_feature (2001): n equals a,t,g, or c
  misc_feature (2002): n equals a,t,g, or c
  misc_feature (2003): n equals a,t,g, or c
  misc_feature (2004): n equals a,t,g, or c
  misc_feature (2005): n equals a,t,g, or c
  misc_feature (2006): n equals a,t,g, or c
  misc_feature (2007): n equals a,t,g, or c
  misc_feature (2008): n equals a,t,g, or c
  misc_feature (2009): n equals a,t,g, or c
  misc_feature (2010): n equals a,t,g, or c
  misc_feature (2011): n equals a,t,g, or c
  misc_feature (2012): n equals a,t,g, or c
  misc_feature (2013): n equals a,t,g, or c
  misc_feature (2014): n equals a,t,g, or c
  misc_feature (2015): n equals a,t,g, or c
  misc_feature (2016): n equals a,t,g, or c
  misc_feature (2017): n equals a,t,g, or c
  misc_feature (2018): n equals a,t,g, or c
  misc_feature (2019): n equals a,t,g, or c
  misc_feature (2020): n equals a,t,g, or c
  misc_feature (2021): n equals a,t,g, or c
  misc_feature (2022): n equals a,t,g, or c
  misc_feature (2023): n equals a,t,g, or c
  misc_feature (2024): n equals a,t,g, or c
  misc_feature (2025): n equals a,t,g, or c
  misc_feature (2026): n equals a,t,g, or c
  misc_feature (2027): n equals a,t,g, or c
  misc_feature (2028): n equals a,t,g, or c
  misc_feature (2029): n equals a,t,g, or c
  misc_feature (2030): n equals a,t,g, or c
  misc_feature (2031): n equals a,t,g, or c
  misc_feature (2032): n equals a,t,g, or c
  misc_feature (2033): n equals a,t,g, or c
  misc_feature (2034): n equals a,t,g, or c
  misc_feature (2035): n equals a,t,g, or c
  misc_feature (2036): n equals a,t,g, or c
  misc_feature (2037): n equals a,t,g, or c
  misc_feature (2038): n equals a,t,g, or c
  misc_feature (2039): n equals a,t,g, or c
  misc_feature (2040): n equals a,t,g, or c
  misc_feature (2041): n equals a,t,g, or c
  misc_feature (2042): n equals a,t,g, or c
  misc_feature (2043): n equals a,t,g, or c
  misc_feature (2044): n equals a,t,g, or c
  misc_feature (2045): n equals a,t,g, or c
  misc_feature (2046): n equals a,t,g, or c
  misc_feature (2047): n equals a,t,g, or c
  misc_feature (2048): n equals a,t,g, or c
  misc_feature (2049): n equals a,t,g, or c
  misc_feature (2050): n equals a,t,g, or c
  misc_feature (2051): n equals a,t,g, or c
  misc_feature (2052): n equals a,t,g, or c
  misc_feature (2053): n equals a,t,g, or c
  misc_feature (2054): n equals a,t,g, or c
  misc_feature (2055): n equals a,t,g, or c
  misc_feature (2056): n equals a,t,g, or c
  misc_feature (2057): n equals a,t,g, or c
  misc_feature (2058): n equals a,t,g, or c
  misc_feature (2059): n equals a,t,g, or c
  misc_feature (2060): n equals a,t,g, or c
  misc_feature (2061): n equals a,t,g, or c
  misc_feature (2062): n equals a,t,g, or c
  misc_feature (2063): n equals a,t,g, or c
  misc_feature (2064): n equals a,t,g, or c
  misc_feature (2065): n equals a,t,g, or c
  misc_feature (2066): n equals a,t,g, or c
  misc_feature (2067): n equals a,t,g, or c
  misc_feature (2068): n equals a,t,g, or c
  misc_feature (2069): n equals a,t,g, or c
  misc_feature (2070): n equals a,t,g, or c
  misc_feature (2071): n equals a,t,g, or c
  misc_feature (2072): n equals a,t,g, or c
  misc_feature (2073): n equals a,t,g, or c
  misc_feature (2074): n equals a,t,g, or c
  misc_feature (2075): n equals a,t,g, or c
  misc_feature (2076): n equals a,t,g, or c
  misc_feature (2077): n equals a,t,g, or c
  misc_feature (2078): n equals a,t,g, or c
  misc_feature (2079): n equals a,t,g, or c
  misc_feature (2080): n equals a,t,g, or c
  misc_feature (2081): n equals a,t,g, or c
  misc_feature (2082): n equals a,t,g, or c
  misc_feature (2083): n equals a,t,g, or c
  misc_feature (2084): n equals a,t,g, or c
  misc_feature (2085): n equals a,t,g, or c
  misc_feature (2086): n equals a,t,g, or c
  misc_feature (2087): n equals a,t,g, or c
  misc_feature (2088): n equals a,t,g, or c
  misc_feature (2089): n equals a,t,g, or c
  misc_feature (2090): n equals a,t,g, or c
  misc_feature (2091): n equals a,t,g, or c
  misc_feature (2092): n equals a,t,g, or c
  misc_feature (2093): n equals a,t,g, or c
  misc_feature (2094): n equals a,t,g, or c
  misc_feature (2095): n equals a,t,g, or c
  misc_feature (2096): n equals a,t,g, or c
  misc_feature (2097): n equals a,t,g, or c
  misc_feature (2098): n equals a,t,g, or c
  misc_feature (2099): n equals a,t,g, or c
  misc_feature (2100): n equals a,t,g, or c
  misc_feature (2101): n equals a,t,g, or c
  misc_feature (2102): n equals a,t,g, or c
  misc_feature (2103): n equals a,t,g, or c
  misc_feature (2104): n equals a,t,g, or c
  misc_feature (2105): n equals a,t,g, or c
  misc_feature (2106): n equals a,t,g, or c
  misc_feature (2107): n equals a,t,g, or c
  misc_feature (2108): n equals a,t,g, or c
  misc_feature (2109): n equals a,t,g, or c
  misc_feature (2110): n equals a,t,g, or c
  misc_feature (2111): n equals a,t,g, or c
  misc_feature (2112): n equals a,t,g, or c
  misc_feature (2113): n equals a,t,g, or c
  misc_feature (2114): n equals a,t,g, or c
  misc_feature (2115): n equals a,t,g, or c
  misc_feature (2116): n equals a,t,g, or c
  misc_feature (2117): n equals a,t,g, or c
  misc_feature (2118): n equals a,t,g, or c
  misc_feature (2119): n equals a,t,g, or c
  misc_feature (2120): n equals a,t,g, or c
  misc_feature (2121): n equals a,t,g, or c
  misc_feature (2122): n equals a,t,g, or c
  misc_feature (2123): n equals a,t,g, or c
  misc_feature (2124): n equals a,t,g, or c
  misc_feature (2125): n equals a,t,g, or c
  misc_feature (2126): n equals a,t,g, or c
  misc_feature (2127): n equals a,t,g, or c
  misc_feature (2128): n equals a,t,g, or c
  misc_feature (2129): n equals a,t,g, or c
  misc_feature (2130): n equals a,t,g, or c
  misc_feature (2131): n equals a,t,g, or c
  misc_feature (2132): n equals a,t,g, or c
  misc_feature (2133): n equals a,t,g, or c
  misc_feature (2134): n equals a,t,g, or c
  misc_feature (2135): n equals a,t,g, or c
  misc_feature (2136): n equals a,t,g, or c
  misc_feature (2137): n equals a,t,g, or c
  misc_feature (2138): n equals a,t,g, or c
  misc_feature (2139): n equals a,t,g, or c
  misc_feature (2140): n equals a,t,g, or c
  misc_feature (2141): n equals a,t,g, or c
  misc_feature (2142): n equals a,t,g, or c
  misc_feature (2143): n equals a,t,g, or c
  misc_feature (2144): n equals a,t,g, or c
  misc_feature (2145): n equals a,t,g, or c
  misc_feature (2146): n equals a,t,g, or c
  misc_feature (2147): n equals a,t,g, or c
  misc_feature (2148): n equals a,t,g, or c
  misc_feature (2149): n equals a,t,g, or c
  misc_feature (2150): n equals a,t,g, or c
  misc_feature (2151): n equals a,t,g, or c
  misc_feature (2152): n equals a,t,g, or c
  misc_feature (2153): n equals a,t,g, or c
  misc_feature (2154): n equals a,t,g, or c
  misc_feature (2155): n equals a,t,g, or c
  misc_feature (2156): n equals a,t,g, or c
  misc_feature (2157): n equals a,t,g, or c
  misc_feature (2158): n equals a,t,g, or c
  misc_feature (2159): n equals a,t,g, or c
  misc_feature (2160): n equals a,t,g, or c
  misc_feature (2161): n equals a,t,g, or c
  misc_feature (2162): n equals a,t,g, or c
  misc_feature (2163): n equals a,t,g, or c
  misc_feature (2164): n equals a,t,g, or c
  misc_feature (2165): n equals a,t,g, or c
  misc_feature (2166): n equals a,t,g, or c
  misc_feature (2167): n equals a,t,g, or c
  misc_feature (2168): n equals a,t,g, or c
  misc_feature (2169): n equals a,t,g, or c
  misc_feature (2170): n equals a,t,g, or c
  misc_feature (2171): n equals a,t,g, or c
  misc_feature (2172): n equals a,t,g, or c
  misc_feature (2173): n equals a,t,g, or c
  misc_feature (2174): n equals a,t,g, or c
  misc_feature (2175): n equals a,t,g, or c
  misc_feature (2176): n equals a,t,g, or c
  misc_feature (2177): n equals a,t,g, or c
  misc_feature (2178): n equals a,t,g, or c
  misc_feature (2179): n equals a,t,g, or c
  misc_feature (2180): n equals a,t,g, or c
  misc_feature (2181): n equals a,t,g, or c
  misc_feature (2182): n equals a,t,g, or c
  misc_feature (2183): n equals a,t,g, or c
  misc_feature (2184): n equals a,t,g, or c
  misc_feature (2185): n equals a,t,g, or c
  misc_feature (2186): n equals a,t,g, or c
  misc_feature (2187): n equals a,t,g, or c
  misc_feature (2188): n equals a,t,g, or c
  misc_feature (2189): n equals a,t,g, or c
  misc_feature (2190): n equals a,t,g, or c
  misc_feature (2191): n equals a,t,g, or c
  misc_feature (2192): n equals a,t,g, or c
  misc_feature (2193): n equals a,t,g, or c
  misc_feature (2194): n equals a,t,g, or c
  misc_feature (2195): n equals a,t,g, or c
  misc_feature (2196): n equals a,t,g, or c
  misc_feature (2197): n equals a,t,g, or c
  misc_feature (2198): n equals a,t,g, or c
  misc_feature (2199): n equals a,t,g, or c
  misc_feature (2200): n equals a,t,g, or c
  misc_feature (2201): n equals a,t,g, or c
  misc_feature (2202): n equals a,t,g, or c
  misc_feature (2203): n equals a,t,g, or c
  misc_feature (2204): n equals a,t,g, or c
  misc_feature (2205): n equals a,t,g, or c
  misc_feature (2206): n equals a,t,g, or c
  misc_feature (2207): n equals a,t,g, or c
  misc_feature (2208): n equals a,t,g, or c
  misc_feature (2209): n equals a,t,g, or c
  misc_feature (2210): n equals a,t,g, or c
  misc_feature (2211): n equals a,t,g, or c
  misc_feature (2212): n equals a,t,g, or c
  misc_feature (2213): n equals a,t,g, or c
  misc_feature (2214): n equals a,t,g, or c
  misc_feature (2215): n equals a,t,g, or c
  misc_feature (2216): n equals a,t,g, or c
  misc_feature (2217): n equals a,t,g, or c
  misc_feature (2218): n equals a,t,g, or c
  misc_feature (2219): n equals a,t,g, or c
  misc_feature (2220): n equals a,t,g, or c
  misc_feature (2221): n equals a,t,g, or c
  misc_feature (2222): n equals a,t,g, or c
  misc_feature (2223): n equals a,t,g, or c
  misc_feature (2224): n equals a,t,g, or c
  misc_feature (2225): n equals a,t,g, or c
  misc_feature (2226): n equals a,t,g, or c
  misc_feature (2227): n equals a,t,g, or c
  misc_feature (2228): n equals a,t,g, or c
  misc_feature (2229): n equals a,t,g, or c
  misc_feature (2230): n equals a,t,g, or c
  misc_feature (2231): n equals a,t,g, or c
  misc_feature (2232): n equals a,t,g, or c
  misc_feature (2233): n equals a,t,g, or c
  misc_feature (2234): n equals a,t,g, or c
  misc_feature (2235): n equals a,t,g, or c
  misc_feature (2236): n equals a,t,g, or c
  misc_feature (2237): n equals a,t,g, or c
  misc_feature (2238): n equals a,t,g, or c
  misc_feature (2239): n equals a,t,g, or c
  misc_feature (2240): n equals a,t,g, or c
  misc_feature (2241): n equals a,t,g, or c
  misc_feature (2242): n equals a,t,g, or c
  misc_feature (2243): n equals a,t,g, or c
  misc_feature (2244): n equals a,t,g, or c
  misc_feature (2245): n equals a,t,g, or c
  misc_feature (2246): n equals a,t,g, or c
  misc_feature (2247): n equals a,t,g, or c
  misc_feature (2248): n equals a,t,g, or c
  misc_feature (2249): n equals a,t,g, or c
  misc_feature (2250): n equals a,t,g, or c
  misc_feature (2251): n equals a,t,g, or c
  misc_feature (2252): n equals a,t,g, or c
  misc_feature (2253): n equals a,t,g, or c
  misc_feature (2254): n equals a,t,g, or c
  misc_feature (2255): n equals a,t,g, or c
  misc_feature (2256): n equals a,t,g, or c
  misc_feature (2257): n equals a,t,g, or c
  misc_feature (2258): n equals a,t,g, or c
  misc_feature (2259): n equals a,t,g, or c
  misc_feature (2260): n equals a,t,g, or c
  misc_feature (2261): n equals a,t,g, or c
  misc_feature (2262): n equals a,t,g, or c
  misc_feature (2263): n equals a,t,g, or c
  misc_feature (2264): n equals a,t,g, or c
  misc_feature (2265): n equals a,t,g, or c
  misc_feature (2266): n equals a,t,g, or c
  misc_feature (2267): n equals a,t,g, or c
  misc_feature (2268): n equals a,t,g, or c
  misc_feature (2269): n equals a,t,g, or c
  misc_feature (2270): n equals a,t,g, or c
  misc_feature (2271): n equals a,t,g, or c
  misc_feature (2272): n equals a,t,g, or c
  misc_feature (2273): n equals a,t,g, or c
  misc_feature (2274): n equals a,t,g, or c
  misc_feature (2275): n equals a,t,g, or c
  misc_feature (2276): n equals a,t,g, or c
  misc_feature (2277): n equals a,t,g, or c
  misc_feature (2278): n equals a,t,g, or c
  misc_feature (2279): n equals a,t,g, or c
  misc_feature (2280): n equals a,t,g, or c
  misc_feature (2281): n equals a,t,g, or c
  misc_feature (2282): n equals a,t,g, or c
  misc_feature (2283): n equals a,t,g, or c
  misc_feature (2284): n equals a,t,g, or c
  misc_feature (2285): n equals a,t,g, or c
  misc_feature (2286): n equals a,t,g, or c
  misc_feature (2287): n equals a,t,g, or c
  misc_feature (2288): n equals a,t,g, or c
  misc_feature (2289): n equals a,t,g, or c
  misc_feature (2290): n equals a,t,g, or c
  misc_feature (2291): n equals a,t,g, or c
  misc_feature (2292): n equals a,t,g, or c
  misc_feature (2293): n equals a,t,g, or c
  misc_feature (2294): n equals a,t,g, or c
  misc_feature (2295): n equals a,t,g, or c
  misc_feature (2296): n equals a,t,g, or c
  misc_feature (2297): n equals a,t,g, or c
  misc_feature (2298): n equals a,t,g, or c
  misc_feature (2299): n equals a,t,g, or c
  misc_feature (2300): n equals a,t,g, or c
  misc_feature (2301): n equals a,t,g, or c
  misc_feature (2302): n equals a,t,g, or c
  misc_feature (2303): n equals a,t,g, or c
  misc_feature (2304): n equals a,t,g, or c
  misc_feature (2305): n equals a,t,g, or c
  misc_feature (2306): n equals a,t,g, or c
  misc_feature (2307): n equals a,t,g, or c
  misc_feature (2308): n equals a,t,g, or c
  misc_feature (2309): n equals a,t,g, or c
  misc_feature (2310): n equals a,t,g, or c
  misc_feature (2311): n equals a,t,g, or c
  misc_feature (2312): n equals a,t,g, or c
  misc_feature (2313): n equals a,t,g, or c
  misc_feature (2314): n equals a,t,g, or c
  misc_feature (2315): n equals a,t,g, or c
  misc_feature (2316): n equals a,t,g, or c
  misc_feature (2317): n equals a,t,g, or c
  misc_feature (2318): n equals a,t,g, or c
  misc_feature (2319): n equals a,t,g, or c
  misc_feature (2320): n equals a,t,g, or c
  misc_feature (2321): n equals a,t,g, or c
  misc_feature (2322): n equals a,t,g, or c
  misc_feature (2323): n equals a,t,g, or c
  misc_feature (2324): n equals a,t,g, or c
  misc_feature (2325): n equals a,t,g, or c
  misc_feature (2326): n equals a,t,g, or c
  misc_feature (2327): n equals a,t,g, or c
  misc_feature (2328): n equals a,t,g, or c
  misc_feature (2329): n equals a,t,g, or c
  misc_feature (2330): n equals a,t,g, or c
  misc_feature (2331): n equals a,t,g, or c
  misc_feature (2332): n equals a,t,g, or c
  misc_feature (2333): n equals a,t,g, or c
  misc_feature (2334): n equals a,t,g, or c
  misc_feature (2335): n equals a,t,g, or c
  misc_feature (2336): n equals a,t,g, or c
  misc_feature (2337): n equals a,t,g, or c
  misc_feature (2338): n equals a,t,g, or c
  misc_feature (2339): n equals a,t,g, or c
  misc_feature (2340): n equals a,t,g, or c
  misc_feature (2341): n equals a,t,g, or c
  misc_feature (2342): n equals a,t,g, or c
  misc_feature (2343): n equals a,t,g, or c
  misc_feature (2344): n equals a,t,g, or c
  misc_feature (2345): n equals a,t,g, or c
  misc_feature (2346): n equals a,t,g, or c
  misc_feature (2347): n equals a,t,g, or c
  misc_feature (2348): n equals a,t,g, or c
  misc_feature (2349): n equals a,t,g, or c
  misc_feature (2350): n equals a,t,g, or c
  misc_feature (2351): n equals a,t,g, or c
  misc_feature (2352): n equals a,t,g, or c
  misc_feature (2353): n equals a,t,g, or c
  misc_feature (2354): n equals a,t,g, or c
  misc_feature (2355): n equals a,t,g, or c
  misc_feature (2356): n equals a,t,g, or c
  misc_feature (2357): n equals a,t,g, or c
  misc_feature (2358): n equals a,t,g, or c
  misc_feature (2359): n equals a,t,g, or c
  misc_feature (2360): n equals a,t,g, or c
  misc_feature (2361): n equals a,t,g, or c
  misc_feature (2362): n equals a,t,g, or c
  misc_feature (2363): n equals a,t,g, or c
  misc_feature (2364): n equals a,t,g, or c
  misc_feature (2365): n equals a,t,g, or c
  misc_feature (2366): n equals a,t,g, or c
  misc_feature (2367): n equals a,t,g, or c
  misc_feature (2368): n equals a,t,g, or c
  misc_feature (2369): n equals a,t,g, or c
  misc_feature (2370): n equals a,t,g, or c
  misc_feature (2371): n equals a,t,g, or c
  misc_feature (2372): n equals a,t,g, or c
  misc_feature (2373): n equals a,t,g, or c
  misc_feature (2374): n equals a,t,g, or c
  misc_feature (2375): n equals a,t,g, or c
  misc_feature (2376): n equals a,t,g, or c
  misc_feature (2377): n equals a,t,g, or c
  misc_feature (2378): n equals a,t,g, or c
  misc_feature (2379): n equals a,t,g, or c
  misc_feature (2380): n equals a,t,g, or c
  misc_feature (2381): n equals a,t,g, or c
  misc_feature (2382): n equals a,t,g, or c
  misc_feature (2383): n equals a,t,g, or c
  misc_feature (2384): n equals a,t,g, or c
  misc_feature (2385): n equals a,t,g, or c
  misc_feature (2386): n equals a,t,g, or c
  misc_feature (2387): n equals a,t,g, or c
  misc_feature (2388): n equals a,t,g, or c
  misc_feature (2389): n equals a,t,g, or c
  misc_feature (2390): n equals a,t,g, or c
  misc_feature (2391): n equals a,t,g, or c
  misc_feature (2392): n equals a,t,g, or c
  misc_feature (2393): n equals a,t,g, or c
  misc_feature (2394): n equals a,t,g, or c
  misc_feature (2395): n equals a,t,g, or c
  misc_feature (2396): n equals a,t,g, or c
  misc_feature (2397): n equals a,t,g, or c
  misc_feature (2398): n equals a,t,g, or c
  misc_feature (2399): n equals a,t,g, or c
  misc_feature (2400): n equals a,t,g, or c
  misc_feature (2401): n equals a,t,g, or c
  misc_feature (2402): n equals a,t,g, or c
  misc_feature (2403): n equals a,t,g, or c
  misc_feature (2404): n equals a,t,g, or c
  misc_feature (2405): n equals a,t,g, or c
  misc_feature (2406): n equals a,t,g, or c
  misc_feature (2407): n equals a,t,g, or c
  misc_feature (2408): n equals a,t,g, or c
  misc_feature (2409): n equals a,t,g, or c
  misc_feature (2410): n equals a,t,g, or c
  misc_feature (2411): n equals a,t,g, or c
  misc_feature (2412): n equals a,t,g, or c
  misc_feature (2413): n equals a,t,g, or c
  misc_feature (2414): n equals a,t,g, or c
  misc_feature (2415): n equals a,t,g, or c
  misc_feature (2416): n equals a,t,g, or c
  misc_feature (2417): n equals a,t,g, or c
  misc_feature (2418): n equals a,t,g, or c
  misc_feature (2419): n equals a,t,g, or c
  misc_feature (2420): n equals a,t,g, or c
  misc_feature (2421): n equals a,t,g, or c
  misc_feature (2422): n equals a,t,g, or c
  misc_feature (2423): n equals a,t,g, or c
  misc_feature (2424): n equals a,t,g, or c
  misc_feature (2425): n equals a,t,g, or c
  misc_feature (2426): n equals a,t,g, or c
  misc_feature (2427): n equals a,t,g, or c
  misc_feature (2428): n equals a,t,g, or c
  misc_feature (2429): n equals a,t,g, or c
  misc_feature (2430): n equals a,t,g, or c
  misc_feature (2431): n equals a,t,g, or c
  misc_feature (2432): n equals a,t,g, or c
  misc_feature (2433): n equals a,t,g, or c
  misc_feature (2434): n equals a,t,g, or c
  misc_feature (2435): n equals a,t,g, or c
  misc_feature (2436): n equals a,t,g, or c
  misc_feature (2437): n equals a,t,g, or c
  misc_feature (2438): n equals a,t,g, or c
  misc_feature (2439): n equals a,t,g, or c
  misc_feature (2440): n equals a,t,g, or c
  misc_feature (2441): n equals a,t,g, or c
  misc_feature (2442): n equals a,t,g, or c
  misc_feature (2443): n equals a,t,g, or c
  misc_feature (2444): n equals a,t,g, or c
  misc_feature (2445): n equals a,t,g, or c
  misc_feature (2446): n equals a,t,g, or c
  misc_feature (2447): n equals a,t,g, or c
  misc_feature (2448): n equals a,t,g, or c
  misc_feature (2449): n equals a,t,g, or c
  misc_feature (2450): n equals a,t,g, or c
  misc_feature (2451): n equals a,t,g, or c
  misc_feature (2452): n equals a,t,g, or c
  misc_feature (2453): n equals a,t,g, or c
  misc_feature (2454): n equals a,t,g, or c
  misc_feature (2455): n equals a,t,g, or c
  misc_feature (2456): n equals a,t,g, or c
  misc_feature (2457): n equals a,t,g, or c
  misc_feature (2458): n equals a,t,g, or c
  misc_feature (2459): n equals a,t,g, or c
  misc_feature (2460): n equals a,t,g, or c
  misc_feature (2461): n equals a,t,g, or c
  misc_feature (2462): n equals a,t,g, or c
  misc_feature (2463): n equals a,t,g, or c
  misc_feature (2464): n equals a,t,g, or c
  misc_feature (2465): n equals a,t,g, or c
  misc_feature (2466): n equals a,t,g, or c
  misc_feature (2467): n equals a,t,g, or c
  misc_feature (2468): n equals a,t,g, or c
  misc_feature (2469): n equals a,t,g, or c
  misc_feature (2470): n equals a,t,g, or c
  misc_feature (2471): n equals a,t,g, or c
  misc_feature (2472): n equals a,t,g, or c
  misc_feature (2473): n equals a,t,g, or c
  misc_feature (2474): n equals a,t,g, or c
  misc_feature (2475): n equals a,t,g, or c
  misc_feature (2476): n equals a,t,g, or c
  misc_feature (2477): n equals a,t,g, or c
  misc_feature (2478): n equals a,t,g, or c
  misc_feature (2479): n equals a,t,g, or c
  misc_feature (2480): n equals a,t,g, or c
  misc_feature (2481): n equals a,t,g, or c
  misc_feature (2482): n equals a,t,g, or c
  misc_feature (2483): n equals a,t,g, or c
  misc_feature (2484): n equals a,t,g, or c
  misc_feature (2485): n equals a,t,g, or c
  misc_feature (2486): n equals a,t,g, or c
  misc_feature (2487): n equals a,t,g, or c
  misc_feature (2488): n equals a,t,g, or c
  misc_feature (2489): n equals a,t,g, or c
  misc_feature (2490): n equals a,t,g, or c
  misc_feature (2491): n equals a,t,g, or c
  misc_feature (2492): n equals a,t,g, or c
  misc_feature (2493): n equals a,t,g, or c
  misc_feature (2494): n equals a,t,g, or c
  misc_feature (2495): n equals a,t,g, or c
  misc_feature (2496): n equals a,t,g, or c
  misc_feature (2497): n equals a,t,g, or c
  misc_feature (2498): n equals a,t,g, or c
  misc_feature (2499): n equals a,t,g, or c
  misc_feature (2500): n equals a,t,g, or c
  misc_feature (2501): n equals a,t,g, or c
  misc_feature (2502): n equals a,t,g, or c
  misc_feature (2503): n equals a,t,g, or c
  misc_feature (2504): n equals a,t,g, or c
  misc_feature (2505): n equals a,t,g, or c
  misc_feature (2506): n equals a,t,g, or c
  misc_feature (2507): n equals a,t,g, or c
  misc_feature (2508): n equals a,t,g, or c
  misc_feature (2509): n equals a,t,g, or c
  misc_feature (2510): n equals a,t,g, or c
  misc_feature (2511): n equals a,t,g, or c
  misc_feature (2512): n equals a,t,g, or c
  misc_feature (2513): n equals a,t,g, or c
  misc_feature (2514): n equals a,t,g, or c
  misc_feature (2515): n equals a,t,g, or c
  misc_feature (2516): n equals a,t,g, or c
  misc_feature (2517): n equals a,t,g, or c
  misc_feature (2518): n equals a,t,g, or c
  misc_feature (2519): n equals a,t,g, or c
  misc_feature (2520): n equals a,t,g, or c
  misc_feature (2521): n equals a,t,g, or c
  misc_feature (2522): n equals a,t,g, or c
  misc_feature (2523): n equals a,t,g, or c
  misc_feature (2524): n equals a,t,g, or c
  misc_feature (2525): n equals a,t,g, or c
  misc_feature (2526): n equals a,t,g, or c
  misc_feature (2527): n equals a,t,g, or c
  misc_feature (2528): n equals a,t,g, or c
  misc_feature (2529): n equals a,t,g, or c
  misc_feature (2530): n equals a,t,g, or c
  misc_feature (2531): n equals a,t,g, or c
  misc_feature (2532): n equals a,t,g, or c
  misc_feature (2533): n equals a,t,g, or c
  misc_feature (2534): n equals a,t,g, or c
  misc_feature (2535): n equals a,t,g, or c
  misc_feature (2536): n equals a,t,g, or c
  misc_feature (2537): n equals a,t,g, or c
  misc_feature (2538): n equals a,t,g, or c
  misc_feature (2539): n equals a,t,g, or c
  misc_feature (2540): n equals a,t,g, or c
  misc_feature (2541): n equals a,t,g, or c
  misc_feature (2542): n equals a,t,g, or c
  misc_feature (2543): n equals a,t,g, or c
  misc_feature (2544): n equals a,t,g, or c
  misc_feature (2545): n equals a,t,g, or c
  misc_feature (2546): n equals a,t,g, or c
  misc_feature (2547): n equals a,t,g, or c
  misc_feature (2548): n equals a,t,g, or c
  misc_feature (2549): n equals a,t,g, or c
  misc_feature (2550): n equals a,t,g, or c
  misc_feature (2551): n equals a,t,g, or c
  misc_feature (2552): n equals a,t,g, or c
  misc_feature (2553): n equals a,t,g, or c
  misc_feature (2554): n equals a,t,g, or c
  misc_feature (2555): n equals a,t,g, or c
  misc_feature (2556): n equals a,t,g, or c
  misc_feature (2557): n equals a,t,g, or c
  misc_feature (2558): n equals a,t,g, or c
  misc_feature (2559): n equals a,t,g, or c
  misc_feature (2560): n equals a,t,g, or c
  misc_feature (2561): n equals a,t,g, or c
  misc_feature (2562): n equals a,t,g, or c
  misc_feature (2563): n equals a,t,g, or c
  misc_feature (2564): n equals a,t,g, or c
  misc_feature (2565): n equals a,t,g, or c
  misc_feature (2566): n equals a,t,g, or c
  misc_feature (2567): n equals a,t,g, or c
  misc_feature (2568): n equals a,t,g, or c
  misc_feature (2569): n equals a,t,g, or c
  misc_feature (2570): n equals a,t,g, or c
  misc_feature (2571): n equals a,t,g, or c
  misc_feature (2572): n equals a,t,g, or c
  misc_feature (2573): n equals a,t,g, or c
  misc_feature (2574): n equals a,t,g, or c
  misc_feature (2575): n equals a,t,g, or c
  misc_feature (2576): n equals a,t,g, or c
  misc_feature (2577): n equals a,t,g, or c
  misc_feature (2578): n equals a,t,g, or c
  misc_feature (2579): n equals a,t,g, or c
  misc_feature (2580): n equals a,t,g, or c
  misc_feature (2581): n equals a,t,g, or c
  misc_feature (2582): n equals a,t,g, or c
  misc_feature (2583): n equals a,t,g, or c
  misc_feature (2584): n equals a,t,g, or c
  misc_feature (2585): n equals a,t,g, or c
  misc_feature (2586): n equals a,t,g, or c
  misc_feature (2587): n equals a,t,g, or c
  misc_feature (2588): n equals a,t,g, or c
  misc_feature (2589): n equals a,t,g, or c
  misc_feature (2590): n equals a,t,g, or c
  misc_feature (2591): n equals a,t,g, or c
  misc_feature (2592): n equals a,t,g, or c
  misc_feature (2593): n equals a,t,g, or c
  misc_feature (2594): n equals a,t,g, or c
  misc_feature (2595): n equals a,t,g, or c
  misc_feature (2596): n equals a,t,g, or c
  misc_feature (2597): n equals a,t,g, or c
  misc_feature (2598): n equals a,t,g, or c
  misc_feature (2599): n equals a,t,g, or c
  misc_feature (2600): n equals a,t,g, or c
  misc_feature (2601): n equals a,t,g, or c
  misc_feature (2602): n equals a,t,g, or c
  misc_feature (2603): n equals a,t,g, or c
  misc_feature (2604): n equals a,t,g, or c
  misc_feature (2605): n equals a,t,g, or c
  misc_feature (2606): n equals a,t,g, or c
  misc_feature (2607): n equals a,t,g, or c
  misc_feature (2608): n equals a,t,g, or c
  misc_feature (2609): n equals a,t,g, or c
  misc_feature (2610): n equals a,t,g, or c
  misc_feature (2611): n equals a,t,g, or c
  misc_feature (2612): n equals a,t,g, or c
  misc_feature (2613): n equals a,t,g, or c
  misc_feature (2614): n equals a,t,g, or c
  misc_feature (2615): n equals a,t,g, or c
  misc_feature (2616): n equals a,t,g, or c
  misc_feature (2617): n equals a,t,g, or c
  misc_feature (2618): n equals a,t,g, or c
  misc_feature (2619): n equals a,t,g, or c
  misc_feature (2620): n equals a,t,g, or c
  misc_feature (2621): n equals a,t,g, or c
  misc_feature (2622): n equals a,t,g, or c
  misc_feature (2623): n equals a,t,g, or c
  misc_feature (2624): n equals a,t,g, or c
  misc_feature (2625): n equals a,t,g, or c
  misc_feature (2626): n equals a,t,g, or c
  misc_feature (2627): n equals a,t,g, or c
  misc_feature (2628): n equals a,t,g, or c
  misc_feature (2629): n equals a,t,g, or c
  misc_feature (2630): n equals a,t,g, or c
  misc_feature (2631): n equals a,t,g, or c
  misc_feature (2632): n equals a,t,g, or c
  misc_feature (2633): n equals a,t,g, or c
  misc_feature (2634): n equals a,t,g, or c
  misc_feature (2635): n equals a,t,g, or c
  misc_feature (2636): n equals a,t,g, or c
  misc_feature (2637): n equals a,t,g, or c
  misc_feature (2638): n equals a,t,g, or c
  misc_feature (2639): n equals a,t,g, or c
  misc_feature (2640): n equals a,t,g, or c
  misc_feature (2641): n equals a,t,g, or c
  misc_feature (2642): n equals a,t,g, or c
  misc_feature (2643): n equals a,t,g, or c
  misc_feature (2644): n equals a,t,g, or c
  misc_feature (2645): n equals a,t,g, or c
  misc_feature (2646): n equals a,t,g, or c
  misc_feature (2647): n equals a,t,g, or c
  misc_feature (2648): n equals a,t,g, or c
  misc_feature (2649): n equals a,t,g, or c
  misc_feature (2650): n equals a,t,g, or c
  misc_feature (2651): n equals a,t,g, or c
  misc_feature (2652): n equals a,t,g, or c
  misc_feature (2653): n equals a,t,g, or c
  misc_feature (2654): n equals a,t,g, or c
  misc_feature (2655): n equals a,t,g, or c
  misc_feature (2656): n equals a,t,g, or c
  misc_feature (2657): n equals a,t,g, or c
  misc_feature (2658): n equals a,t,g, or c
  misc_feature (2659): n equals a,t,g, or c
  misc_feature (2660): n equals a,t,g, or c
  misc_feature (2661): n equals a,t,g, or c
  misc_feature (2662): n equals a,t,g, or c
  misc_feature (2663): n equals a,t,g, or c
  misc_feature (2664): n equals a,t,g, or c
  misc_feature (2665): n equals a,t,g, or c
  misc_feature (2666): n equals a,t,g, or c
  misc_feature (2667): n equals a,t,g, or c
  misc_feature (2668): n equals a,t,g, or c
  misc_feature (2669): n equals a,t,g, or c
  misc_feature (2670): n equals a,t,g, or c
  misc_feature (2671): n equals a,t,g, or c
  misc_feature (2672): n equals a,t,g, or c
  misc_feature (2673): n equals a,t,g, or c
  misc_feature (2674): n equals a,t,g, or c
  misc_feature (2675): n equals a,t,g, or c
  misc_feature (2676): n equals a,t,g, or c
  misc_feature (2677): n equals a,t,g, or c
  misc_feature (2678): n equals a,t,g, or c
  misc_feature (2679): n equals a,t,g, or c
  misc_feature (2680): n equals a,t,g, or c
  misc_feature (2681): n equals a,t,g, or c
  misc_feature (2682): n equals a,t,g, or c
  misc_feature (2683): n equals a,t,g, or c
  misc_feature (2684): n equals a,t,g, or c
  misc_feature (2685): n equals a,t,g, or c
  misc_feature (2686): n equals a,t,g, or c
  misc_feature (2687): n equals a,t,g, or c
  misc_feature (2688): n equals a,t,g, or c
  misc_feature (2689): n equals a,t,g, or c
  misc_feature (2690): n equals a,t,g, or c
  misc_feature (2691): n equals a,t,g, or c
  misc_feature (2692): n equals a,t,g, or c
  misc_feature (2693): n equals a,t,g, or c
  misc_feature (2694): n equals a,t,g, or c
  misc_feature (2695): n equals a,t,g, or c
  misc_feature (2696): n equals a,t,g, or c
  misc_feature (2697): n equals a,t,g, or c
  misc_feature (2698): n equals a,t,g, or c
  misc_feature (2699): n equals a,t,g, or c
  misc_feature (2700): n equals a,t,g, or c
  misc_feature (2701): n equals a,t,g, or c
  misc_feature (2702): n equals a,t,g, or c
  misc_feature (2703): n equals a,t,g, or c
  misc_feature (2704): n equals a,t,g, or c
  misc_feature (2705): n equals a,t,g, or c
  misc_feature (2706): n equals a,t,g, or c
  misc_feature (2707): n equals a,t,g, or c
  misc_feature (2708): n equals a,t,g, or c
  misc_feature (2709): n equals a,t,g, or c
  misc_feature (2710): n equals a,t,g, or c
  misc_feature (2711): n equals a,t,g, or c
  misc_feature (2712): n equals a,t,g, or c
  misc_feature (2713): n equals a,t,g, or c
  misc_feature (2714): n equals a,t,g, or c
  misc_feature (2715): n equals a,t,g, or c
  misc_feature (2716): n equals a,t,g, or c
  misc_feature (2717): n equals a,t,g, or c
  misc_feature (2718): n equals a,t,g, or c
  misc_feature (2719): n equals a,t,g, or c
  misc_feature (2720): n equals a,t,g, or c
  misc_feature (2721): n equals a,t,g, or c
  misc_feature (2722): n equals a,t,g, or c
  misc_feature (2723): n equals a,t,g, or c
  misc_feature (2724): n equals a,t,g, or c
  misc_feature (2725): n equals a,t,g, or c
  misc_feature (2726): n equals a,t,g, or c
  misc_feature (2727): n equals a,t,g, or c
  misc_feature (2728): n equals a,t,g, or c
  misc_feature (2729): n equals a,t,g, or c
  misc_feature (2730): n equals a,t,g, or c
  misc_feature (2731): n equals a,t,g, or c
  misc_feature (2732): n equals a,t,g, or c
  misc_feature (2733): n equals a,t,g, or c
  misc_feature (2734): n equals a,t,g, or c
  misc_feature (2735): n equals a,t,g, or c
  misc_feature (2736): n equals a,t,g, or c
  misc_feature (2737): n equals a,t,g, or c
  misc_feature (2738): n equals a,t,g, or c
  misc_feature (2739): n equals a,t,g, or c
  misc_feature (2740): n equals a,t,g, or c
  misc_feature (2741): n equals a,t,g, or c
  misc_feature (2742): n equals a,t,g, or c
  misc_feature (2743): n equals a,t,g, or c
  misc_feature (2744): n equals a,t,g, or c
  misc_feature (2745): n equals a,t,g, or c
  misc_feature (2746): n equals a,t,g, or c
  misc_feature (2747): n equals a,t,g, or c
  misc_feature (2748): n equals a,t,g, or c
  misc_feature (2749): n equals a,t,g, or c
  misc_feature (2750): n equals a,t,g, or c
  misc_feature (2751): n equals a,t,g, or c
  misc_feature (2752): n equals a,t,g, or c
  misc_feature (2753): n equals a,t,g, or c
  misc_feature (2754): n equals a,t,g, or c
  misc_feature (2755): n equals a,t,g, or c
  misc_feature (2756): n equals a,t,g, or c
  misc_feature (2757): n equals a,t,g, or c
  misc_feature (2758): n equals a,t,g, or c
  misc_feature (2759): n equals a,t,g, or c
  misc_feature (2760): n equals a,t,g, or c
  misc_feature (2761): n equals a,t,g, or c
  misc_feature (2762): n equals a,t,g, or c
  misc_feature (2763): n equals a,t,g, or c
  misc_feature (2764): n equals a,t,g, or c
  misc_feature (2765): n equals a,t,g, or c
  misc_feature (2766): n equals a,t,g, or c
  misc_feature (2767): n equals a,t,g, or c
  misc_feature (2768): n equals a,t,g, or c
  misc_feature (2769): n equals a,t,g, or c
  misc_feature (2770): n equals a,t,g, or c
  misc_feature (2771): n equals a,t,g, or c
  misc_feature (2772): n equals a,t,g, or c
  misc_feature (2773): n equals a,t,g, or c
  misc_feature (2774): n equals a,t,g, or c
  misc_feature (2775): n equals a,t,g, or c
  misc_feature (2776): n equals a,t,g, or c
  misc_feature (2777): n equals a,t,g, or c
  misc_feature (2778): n equals a,t,g, or c
  misc_feature (2779): n equals a,t,g, or c
  misc_feature (2780): n equals a,t,g, or c
  misc_feature (2781): n equals a,t,g, or c
  misc_feature (2782): n equals a,t,g, or c
  misc_feature (2783): n equals a,t,g, or c
  misc_feature (2784): n equals a,t,g, or c
  misc_feature (2785): n equals a,t,g, or c
  misc_feature (2786): n equals a,t,g, or c
  misc_feature (2787): n equals a,t,g, or c
  misc_feature (2788): n equals a,t,g, or c
  misc_feature (2789): n equals a,t,g, or c
  misc_feature (2790): n equals a,t,g, or c
  misc_feature (2791): n equals a,t,g, or c
  misc_feature (2792): n equals a,t,g, or c
  misc_feature (2793): n equals a,t,g, or c
  misc_feature (2794): n equals a,t,g, or c
  misc_feature (2795): n equals a,t,g, or c
  misc_feature (2796): n equals a,t,g, or c
  misc_feature (2797): n equals a,t,g, or c
  misc_feature (2798): n equals a,t,g, or c
  misc_feature (2799): n equals a,t,g, or c
  misc_feature (2800): n equals a,t,g, or c
  misc_feature (2801): n equals a,t,g, or c
  misc_feature (2802): n equals a,t,g, or c
  misc_feature (2803): n equals a,t,g, or c
  misc_feature (2804): n equals a,t,g, or c
  misc_feature (2805): n equals a,t,g, or c
  misc_feature (2806): n equals a,t,g, or c
  misc_feature (2807): n equals a,t,g, or c
  misc_feature (2808): n equals a,t,g, or c
  misc_feature (2809): n equals a,t,g, or c
  misc_feature (2810): n equals a,t,g, or c
  misc_feature (2811): n equals a,t,g, or c
  misc_feature (2812): n equals a,t,g, or c
  misc_feature (2813): n equals a,t,g, or c
  misc_feature (2814): n equals a,t,g, or c
  misc_feature (2815): n equals a,t,g, or c
  misc_feature (2816): n equals a,t,g, or c
  misc_feature (2817): n equals a,t,g, or c
  misc_feature (2818): n equals a,t,g, or c
  misc_feature (2819): n equals a,t,g, or c
tcatatggactctttttctcctccccttcttttccaatgtcatgcagtctcttaacactgggtttcaaccactatacagaaaaatgttagtgaaaaaggaagaggggttccatgctgcttgattctccctaaccaggcacactaaactaggggtgacagtgtatcacaaagtccagactcacagtcttgctgccccttctcctcttcaaagtttgtttccgaagtaccaccccttgcacctcacatcccagccaactctgcctacctgtcagccccagccctcctcaggcctgcctcagcctcacagccaggatcctaccaacaccaacaccgcgccaaataacccctcccaaaagcctcaccggaactaatctggggactctgcctattattaggaacaccttggatgaagcccctacccgcagaattctggcagtagcagcagaattttcaggcatgtgcctaattttgttggggtggtggttgattattttttttaaatctaggatttctgggatctgaagcttatacaatcttggatatcttctttaagaaaaagaatacaaaaatatcttctataagttttacaaaaatatatgaccatgtgagcacgttgctagctcccgcccccaccccaccccccagagccttggaaggggagtgaaactgaagcttttttagcttcatggcaaatatgcttcttcctgagagtactgggtacattcacagacctttattttttactttctatagatttaatttagttaagtcagttcgaagcgggcaaaggccaaaatttctcacccctaggtggctcaaatttctgagcctgagattttatatcttaaaatccattaaaagaatactcaattttcggccgggcgcagtggctcacacctataatcccagcactttgggaggctgaggcgggcagatcacgaggtcaggagatcgagactatcctggctaacacggtgaaaccccgtctccactaaaaatacaaaaaattagccaggcgtggtggcgggcacctgtagtcccagctacccaggaggctgaggcaggagaatggcgtgaacccgggaggcggagcttgcagtgagccgagatcgcgccactgcactctagcctgggcgacagccgtctcaaaaaaagaatactcaatttttaagaagttaggtgtaggtatgcttatataaaatatttagacatgcataagtattttaagtggcctgaaggaagtacatgtatgctacttttgcaaatattttcgctttttttttttttttttttgnnnnnnnnnnnnnnnnnnnnnnnnnnnnnnnnnnnnnnnnnnnnnnnnnnnnnnnnnnnnnnnnnnnnnnnnnnnnnnnnnnnnnnnnnnnnnnnnnnnnnnnnnnnnnnnnnnnnnnnnnnnnnnnnnnnnnnnnnnnnnnnnnnnnnnnnnnnnnnnnnnnnnnnnnnnnnnnnnnnnnnnnnnnnnnnnnnnnnnnnnnnnnnnnnnnnnnnnnnnnnnnnnnnnnnnnnnnnnnnnnnnnnnnnnnnnnnnnnnnnnnnnnnnnnnnnnnnnnnnnnnnnnnnnnnnnnnnnnnnnnnnnnnnnnnnnnnnnnnnnnnnnnnnnnnnnnnnnnnnnnnnnnnnnnnnnnnnnnnnnnnnnnnnnnnnnnnnnnnnnnnnnnnnnnnnnnnnnnnnnnnnnnnnnnnnnnnnnnnnnnnnnnnnnnnnnnnnnnnnnnnnnnnnnnnnnnnnnnnnnnnnnnnnnnnnnnnnnnnnnnnnnnnnnnnnnnnnnnnnnnnnnnnnnnnnnnnnnnnnnnnnnnnnnnnnnnnnnnnnnnnnnnnnnnnnnnnnnnnnnnnnnnnnnnnnnnnnnnnnnnnnnnnnnnnnnnnnnnnnnnnnnnnnnnnnnnnnnnnnnnnnnnnnnnnnnnnnnnnnnnnnnnnnnnnnnnnnnnnnnnnnnnnnnnnnnnnnnnnnnnnnnnnnnnnnnnnnnnnnnnnnnnnnnnnnnnnnnnnnnnnnnnnnnnnnnnnnnnnnnnnnnnnnnnnnnnnnnnnnnnnnnnnnnnnnnnnnnnnnnnnnnnnnnnnnnnnnnnnnnnnnnnnnnnnnnnnnnnnnnnnnnnnnnnnnnnnnnnnnnnnnnnnnnnnnnnnnnnnnnnnnnnnnnnnnnnnnnnnnnnnnnnnnnnnnnnnnnnnnnnnnnnnnnnnnnnnnnnnnnnnnnnnnnnnnnnnnnnnnnnnnnnnnnnnnnnnnnnnnnnnnnnnnnnnnnnnnnnnnnnnnnnnnnnnnnnnnnnnnnnnnnnnnnnnnnnnnnnnnnnnnnnnnnnnnnnnnnnnnnnnnnnnnnnnnnnnnnnnnnnnnnnnnnnnnnnnnnnnnnnnnnnnnnnnnnnnnnnnnnnnnnnnnnnnnnnnnnnnnnnnnnnnnnnnnnnnnnnnnnnnnnnnnnnnnnnnnnnnnnnnnnnnnnnnnnnnnnnnnnnnnnnnnnnnnnnnnnnnnnnnnnnnnnnnnnnnnnnnnnnnnnnnnnnnnnnnnnnnnnnnnnnnnnnnnnnnnnnnnnnnnnnnnnnnnnnnnnnnnnnnnnnnnnnnnnnnnnnnnnnnnnnnnnnnnnnnnnnnnnnnnnnnnnnnnnnnnnnnnnnnnnnnnnnnnnnnnnnnnnnnnnnnnnnnnnnnnnnnnnnnnnnnnnnnnnnnnnnnnnnnnnnnnnnnnnnnnnnnnnnnnnnnnnnnnnnnnnnnnnnnnnnnnnnnnnnnnnnnnnnnnnnnnnnnnnnnnnnnnnnnnnnnnnnnnnnnnnnnnnnnnnnnnnnnnnnnnnnnnnnnnnntcacgcctataatcccagcactttgggagtctgaggcgggcggatcaccagaggtcaggagttcaagaccagcctgaccaacatggtgaaaccccatctctactaaaaatacaaaaattagccaggcatggtggcacacgcctgtagtcccagctacttgggaggctgaggcaggagaattgcttgaacctgagaggcagaggtttcagtgagccaagactgcactactgcactccagcctgaggaacagagcgagactctgtctcaaaaaaaaaaaaaaaaaaaaagaatgtaagtaatttgcccaagctgcagagctaaattttaaactagataattctgattccaaagcccagataatctggctagaagttgcaccaggggattcactgatttacaaagaattagaatgtgataaaattccctgagtacaggcaagtgtgatttttatctttgctagtaaagccatttagatgtcttaaagtgcctcaatctgttgcacctgttctactaaaacaaagaaatgagtcaacggcctcttttagctttaacattctctctgtctatacatttttatagaataatttttagttattgcagcaggtttcaccagtcagccaacgggtgtgtataacattaatcactagcactacacctcagaagtcttgcttattaagagcactcagcttaagtgaagaaattaaagaattttggtaggcctttgggacagttcaagtttaggttgtttggctgggttgagagagtaaaaaactaacatttcttaacctaaccctttttctttctttctcacaggtaacaactatccaatagcttacctttaaaatgtcccctctattgttcctccctcagacatttttgatcacttgtcccagtttccatgagtcctgtatcacagctgtcacaatgcttgagctatttaggtggaggtaactttcagaaatgaactgctgaagggtgcagagtgctcaagaattagattaacaaagaaagtacacctaaatttagcattaaaatgaacttttaaaatatttttcaataggaggataagcaaacataaaaatgggtgtgcttatgtctataaacaggtgctggagcatagattgttatctggacatcaaagaataatagagctgtagctttaaaagagcacacagctggttattagtgattcactcccaggtcactgccaagtgccaaggcatgtggcaagaatagtagaatggaaatcaggtgatgtggattctaatttgagctctgctctgttaaccttgggcatgccagttatcccctttggaccttagtctcttatctacctaatgaagggtttggagcaggtaattcttcagttctaagtaagaatctgtattcatgaataactgttcagcatatgactcagcccaaggtgtacaggattgctggagtgtggaaggtatgttggctcctgcctgtactagcaacaaggcttaatctagtgaacagaaaggatcaaaggtggctatatccccacctaaatgtccatgatctacaagtgctcttctagctggcagagtgggtcagtaatgagattttgtatctcattatatgaagttctaagcactgaacctaatcagttacccatcacttaagtagacagtgtcaggcagagcttaactctccttcctattttcctttgtcttccttttctctgtaagttctctaacataaggaacttccattttggtgaaagaatagaaaagttgagggacaggccaggtgtgttgtaagtaagactgatccagctgattggtttgccatttagattgcatggcagacatctgccataagcacttaaaacacaccttcaataggcattagaaagcacacacacggccaaacatagtagctcacacctgtaatgccaatactttgtgaggctgaggcaggaggattgcttgagcccagcagttcaagaccagcctgggcaatatagcaagatgccatctctacaaaaaattttaaaattatctgaatgtggtagtacattcctgtggtctcagctactcaggggtctgaggtcggaagatcacttgagcccaggagatcaaggctgcagtgagccatgactgtgccattgcactccagcctttgcgacagagcaagaccctgcctcaaaacacacacactgactagggatggtggcttatgcccagcactttaggaggctgaggcaggcagatcacttgaggtcaggagtttaagaccagcctggccaacatggtgaaaccctactctactaaaaatacaaaaatcagccatgcggccaggtgcagtggctctcgcctgtaatcccagcactttgggaagctaaggcaggaggatcacctgaggtcaggagttcgagaccagcctgaccaacatggtgaaatcctgtctctactaaaaatacaaaattagccccgtgtggtggcgcctgcctgtaatcccagctacttgggaggctgaggcaggagaatcacttgaacccaggaggcagaggttacggtgagccgagatcacgccattgcactccagcctgggcaacaagagcgaaactccatctcaaaaaaaaaaaaagaaaagaaaatcagccatgcatggtgacacacagttgtaatcccatctacctgggaggctgaggcaggagaatcgcttgaacctgggaggcagaggttgcagtaagccaagattgcaccactgcactccagcctgggcaacagagtgagactgtgtcttgaaacacacacacacacacacacacacacacacacacacacacacacacacataatttgctgttgttttgggggcatggcggcacatacctatagtcctagctacttgggaggctcaggcaggaggatcacttgaacccaggaagttgaaactgcagtgagctgtgattgtgccgctgcactccagcctgggcaacagagtgaagtactgtctcaagaaaataaaaaaataaagaaataaaaacataaggtttagatggcaactttaaaatgtgaaaggaggatatacagtttttcaaaattcttctaggagctatgccagcaaaaaggtttgaagacctgaagaccattatatcagtggcataaacatctttaatttgtccttttccttctcctacacctagtcaattgattttttttttcccatttatcaatttcagactctgcctggtttttcactttcccatccattttgttacaatatttttcctcccttgaaattagcccagtctcttggagtgaatgccccatgctccttcctaccgctgtgtctttactacattatcctcccttggaatgccgtcatctcttctctgttcaagaactacttctcccgaccactgtggtcgagattgatttctctttaacctctacaacattggctattccatacagttagcccttagcatagaacatcattgtttgattttgctccttaagaatagaaagcacctcttaaaattctaccatattcccccaatgcctaatgcaatgctaaccacatagtgagtgcttaataaatattgtattgactgcctagagtacagagcacttgttcactcattgttcggccattcagctaatactttttgagaaattttgtgtaccaggaactgtactatgcactggggtacggtagggactaaagtagatgataatccctgctttgaaagactgaaaagtaagatatatggtatgtcaaaaggtaataagtactgagaagaaaaatagaaaaagcaggaaagaagaacaagaagtgtgtgatgggggagggttacagggtggggaggggtagtgttgtatacacttctagataagatagggaagtcctcactgatacttatggtgacattttacaaaggacctgaggtgtaggaaggatttgagcttatctgtgcaaagagccttccaggcaaggaacttaccatgtgaaggcaccaaggctggacctgcttaacattccaggaagggaaagctttggggctggagcagaagggtagaggccagattgagagatgagtcagaggacagtggggcccgggcagagggacagaacctgcgggtgctggcaatcagccttttgatctgagtgagaatagaggccttgagagggctttgagcagaggagtgacctgctgacttaagttgaatagaaccctctagatgcttcattaaggctagactgaagggaggcaaaggcagggtgagatcagtcaggaggcaagtatataatgataatacattgaatataataatgatatattaataataataatccagagatagtggcaactcagaccaggggaagcagtagaggcggagagaagtggtcagattttggatttattttgaaggtagaacagacaggattgctgactctgttgagtagtcagctgggagctattgatggtttctgagcaggagctgaaggaagattaccccggtataggactgctgggaagacgtggtgcaggcagagatcaggtaggaggccattgcaaggatttaagggtgagatccataagggttttaactgcaaatcagcagaggaaaaagggagtggtgatggtcatggtgacagtgatggtgagagagactggaaaggaggaatcaacaggatttcatgactagataacagagaaccaatatgaagaaggaaaacactttttttttttttttgagacggagtctggctctgttgcccaggctggagtacagtgagacgatctcagctcactgcaacctccgcctcctgggttcaagcgattctcctgcctcagcctcctgagtagctgggattacaggcatgcaccaccacgcccggctaatttttgtatttttagtagagatggggtttcaccatgttggtcaggctggtcttgaactcttgacctggtgatccgcctgccttggcctcccaaagtgctgggattacagacgtggagccaccatgccctggcaggaaaacacacttttgaatgttgtgtgacctggagaatggtaacactgttaatttaaaaaaaaaaaaaaagcccagagaaggctgatttagggagaaatttatgccttagttatacagagtttgagatggtaatgaaatatcaaattaaaactgtccagcaaggaagtaggaaatgtggaactgaaaaagaagttagaactaaagatgtggatctgtctttggcataaagattatattaagttacttgagagtagatgagtttccaaagaagcagtgtagcaagaatagtggagggccaagactggatcctgggggtcagcaacatctaggagccagaaaaaatgccttcggtgaaagaaacggaaagatgggtctattcaaattgtagtcagccaacccatgccagaagtaagcacagaaagtaagagtgaacattggccaagcacagtggctgatgcctgtaatcccaacactttgggaggccaaggcgggcagattgcttgagctcaggagttcgagaccagcctgagcaacatggtgaaactccaactctacaagaaattagccggtcctgtgcacacctgtagtcccagctgctagggaggctcaggtgggaggatcacttgaacctagaaagttgaggctgcagtgagctgtgagcatgccactgcactccagcgtgggcaacagcccggtggctcacgcctgtaatcccagcactttgggacgccaaggcaggtcgatcacttgaggtcaggagttcgagactagcctggccaacatggagaaaccccatctctactgaaaatacaaaaattagctgggcatggtggtgcacacctgtaatcccagctactcgggaggctgagacaggagaatcacttgaacctgggaagcggaggttgccgtgagccaagatcatgccactgcacttcagcctggacaacacagagagactctgtcccaaagggaaaaaaaagaaaaagatccaggagatccattcctaggtatatacccaagagaattgaaaacataaaaacatatgttcacacaaaaacttgtacatgggctcatacctgtaattgcagcactctgggaggccaaagcaggaggatcatttgaggccaggagttcaagaccggcctaggcaacatagtgagaccctgtctctacaaaatgcatgaatgtttgtagcagcattcttcataatgttcctaaagtggaaacaacccagttgtttgtcagctgatgaatgggtagattatatgcagagtatccaggctgggcgtagtggctcatgcctgcaatcctagcactttgggaagctgaggtggacagatcatttgagctcaggaattcaagaccagcctgagcaacatagtgagaccttgtctataaaaaatttttaaatgttaaaaaaaagaatgcagagtatccatacaacgggatattattcagccataaacaggaatgaagtactgatacatgctacaacatggatgaaccttgaaaacatgctaagtgaaataagccagacacaaaggtctacacattgcctgacgccatttatatgaaacacctagaataggccaatctatagagacataaagtagatgaatggttgccaggctctgggagttaagagagaatgggaaatgactgccaacatgtatggggtttctacttgaggtgatgaagatattctgaaattagatagatagtggggatggctgcacaaccttttttttttttctttttgagatggagtctcgctctgttgccaggctggagtgcagtggcgcaatctcagctcactgcaatctctgcctcctgggttcaagcaattctcctccctcagcctcctgagtagctgggactacaggcaggcaccaccacgcccagctaattttttgttagtagagacagggtttcaccatgttggccaggatggtcttgatctcctgacctcgtgatctgccctcctccggctcccaaagtgctgggattacaggcataagccaccatgcccggcgacaaccttttgaatatactaaaaaacattacattttacactttgaagggtgaattttatggtaaattatatctcagtagaaaaaaatccaggaaactgtgtatagtcagccctccatatttgtgggttccacattcatggattctaagctaaataataatacaataataaaaatataaataaaaaacaatatgctatatagcagctatttgcattgcatttacattatattaggtattatgagtaatccagagatgatttaaagtgtatgtgaagatgtgcataggttacatgcaatactacaccatattatataagggacttgagcatctgtggtgtctgctgcgagtactagaaccaatccttcatggacaccaagagataactgtattcaaaaccaatgaaaccagtgaaagagaagtttcaaaaagattgaaaacacagcagggcagtcaaggaaaccagggagaaaggaaagactagtggatttgggtattagaagatgaaagattaaaacaaatcattccatatcagcatgcagtccatagactactcctaaaagttcctgagacttctttaaggaatctctttggggtaaaaattattttcatgatactactaagatgtatttgtcttttccctatgttgacacttgcactgatgttgcaaaatggtggtaaaactgctggcgccttagcacaaatcaggacggtgacaccaaactgtaccagtggtcactgcattctttactgccatgcactcacaatcaaaacagagccagtttcacttaagaatcgttgatgaagtggtaaattttttttgttttttttttttgaggcagggtcttacccaggctagagtgcggtgggggcatcacagctcactgccgcctcaacttcctgggctcaggtgatgctacctcagcctcctgagtagctgaggctacaggtgtgcaccaccacacctggctaatttttgtttttgttttgttttgttttgtttttagagatggggtttcactctgtcgcccaggctaaatattgttaattgtatcaaatgtcagtccttgaataaatcttttttttttaactggtatgcaccaccacacccagctaatttttgtatttttagtagagacggggtttcgccatgttggccaggctggtctggaactcctgacctaaagtgatctacccgtcttggcctcccagagtgctgggaggtgtgggccaccatgcctgatcctgagtacatctttttaaacttgtttgaagaaatgggaaatatgcataaaccgcctctgctgcacactggtagagtacggtggttgtcacaaggaaaagcatttgggcgattattcaagttgcatattgatttagcagcttcttttttcaccgaccaccatttttacttgaaagaatgatagacaaactatggttttagacttaggcatctggcagacagtctcttgaaactgtatgaagtgagcctgtcacttcaaggtaaacaaatgacaatatttgtagccagtgataaaatttacactttcaagtaaaaattagaattttggaaaacttgtatccactcccatgagcttgaccacttttcaatatatacagacttttctgctgaaatcaatggtgaaatttaaggaatatgattttttgatatgtattctaatgaaatatgtcagtatttagaagatctgcctaacaacagggaaccagtattttgcagtgatctatgtgtgatgttacaaagtcatgcatggtaaaatatccattcaaagtgcaagagaagccaatgggttttattataacaaaagttcctaactgttaagaaactactacttgtcaagttttgatgtagcgctaaagaatatccaaaattatctgaaaatgcagatactttctctgtctgtgtaaagccagattttctttgtatattttaaccaaactaacatattacaacagattaaatgcagaagcagatttgagaatccagtcatcttctattaagtcagacagaggccataaatttatgaaaatgtaaaacagtggcattcttctcattagatggctttatttctttgattgttttgggaaatatagtggtttacatttaaagtatgttatttatattaatataatgtgtagtagttttactgttaatatttttactgaattaatcatatcttttactttttttttagttttattttcttccttttttttttttttttgatttggagtctcgctctgttgcctagtctggagcacagtggcgtgatctcagctcactacaacccccacctcctgggttcaagcgattctcctgcctcagcctcccaagtagctgggatcacaggcgcctgccaccatgtctggctggtttttgtatttttagtagggtttcaccatgttggccaggatggtctcaaactcctgacctcaagtgatccacccacctcggcctcccaaagcattgggattacaggagtgagccaccacacccagtttttagtcttattttctaacacagtagacattgatatatagttcccacattaacaaaagttgtttggggtgctcaatttatttatttatttatttatttatttatttatttattttattttaattttctttttgaggcggagtctcactgtgtcgcccaggctggagtgcagtggcacaatctcggctcactgcaagctctgcctcccaggttcacaccattctcctgcctcagcctcccgagtagctggggctacaggtgcccgccaccacacccggctaattttttgtatttttagtagagacagggtttcaccatgttaaccaggatggtctcgatctcctgacctcgtgatccgcccgcctcagcctcccgaagtgctgggattacaggcatgagccaccgtgccccgcttatattttttttatttttatttatttatttatttatttttgagacagggtctcaaaaaaaacaactttgttgcccaggctggagtgcagtggcatcatcgtagctcattgtagcttctgtctccccagactcaggtgatcctcctgcctcagcctctcaagtagctgggactacaggcacgcaccacccaccccacccaactattttttttattttttgtagagacagagtcttgctatgttgcccaggctggtctcaaactcctgggttccagtgattctcccgtctcagcctcccaaagcactgggattacaggtgtgagccaccactcccagccaaatttaccagacttaatggaaacagtccatttctgtttcttcagatgaaacctcacaactttaggattaataagtaatctcacaactattgtacaggaaataagaaaacgttcccgctaacaatgcacgttgtgatagatctggtccctgacacaaacagcacttggaactgagtgaagtccagagactgaataatacagttctatccactccctgtgcttgactacaacccctgaagagggcttgtacaaattaaatgtatcccagcagctgcttgaaagaccacagcattggccgggcacggtgactcacgcttgtaatcccagcactttgggaggccgaggcgggcggatcacgaggtcaggagatcgagaccacggtgaaaccctgtctctactaaaaatacaaaaaattagctgggcgtgatggcgggcgcctgtagtcccagctactcggagaggctgaggcaggagaatggcgtgaacccgggaggcggagcttgcagtgagccgagattgcaccactgcactccagcctgggcgacagagactctgtctcaaaaaaaaaaaaaaaaaacacgcattttgaatgtccctagcattagggattataaaggtcccattctagtagaagatcctcaggtttggagtgtactaaaggtcatcatccttcgcctgctaataaatttctgaagtccctgctttaaacaaacaatcaaaaagaaggaacagttacagtgctgccaaacaagttctttttttttttttgagatggagtttcgctcttgttgccaggctggagtgcaatggcgtgatctcggctcaccacaacctccacctcccaggttcaagcaattctgcctcagcctcccgagtagctgggattacaggcatgcactaccacgcccagctaattttgtattttttttagtagagacagggtttctccatgttgaggctagtctcaaactcctgacctcaggtgatccgcctgcctcggcctcccaaagtgctgggattacaggcgtgagccacggcgcccggccaacaagttcttacaaacctctgggttgttacaaacccatctggtgctaataaaggtaaggcatcaaccccaatctccaagctgagaattttatcctcaggactgagcactgcggcctgcattcggatgttagtggggctgtcagaaccgtgtctcatgctgttaaaagtggaagtccttcccactcagacccacggaagccaactctgatgagtgggagggtgagcagaaggggcttcggtcattttttatagattcttcaggtaactctagccaccatattaagcattggctcccacaaaaaagcattaaggctcagaaacatcttgtagggtcacaccctccctaaaaacagcacatccctgaagtggtggctgggcagccaggctccaaagcccgctgagctgagcggcagccaagaacaaggtttggtgtttacatactcaaaatcagcctgggttgtcacagcaactcacctcagcacagttcttccttctccacggcggcttgcttccaggctttgctgttctccgtcaccgtcttaacgttcctgctaacctggcctgctgcattctttttatttttctcccaattcctccgccttcttctcatgtgtttgctagtgtgcaatacctcacctgtttggaactcaacaacgtcccctcctgcaaaacgcacctgaaaacaagaaatagcacacaaggcctctaagtggccagaacagatgttaccaggcctaagtccataaggaaagcacccaagccccttgcttttgtcttaaatctttttttttttacacctttaaaataaggttatggtttctaaggcctgccgtaaattaggagtagggagaggaactattgccaagcaccccaaaagttcaagaggtgactgttgatcccagagtagcaaggaaagggacagacaggctataagaagtggacacaagaactcagaactcaggacagtgtaggccttgttagagtcaggcagacaatttcacatacctcagaacgtcataaagccatcatgactttactctggaatagatacgatccagacacctagaaaatgttaaattagattcaacttaaagaggcagagtaatatgtgtggtgttttttaatttcgagcattccaaatggttaagggttttcatgcttaaagagagaaacttagctacctagaacttatttatgagtgctctagataattatctactgttttatatttttttatttataccccgttactaaaacaaaagtaaaaataaagcaaaagattgaaggcattgacatttagtctatatactttctagttcctggctctagttcttagcaatatttgctgctaacctggtgttctgtctctgccaaatttctgcccatgtgaaatatatgagacttgatcctatttccttgctcattgatctacctgaaagggtcatagatgtctccacctccctagagctagtgatcctatatcccatcatctcagccagctagaaaacgaaccatcacatgccacctcctacccaattacgtgcttcataaacagaatacctggcatatagcaggcatttactaaacacttggtgaatgaatacatgagccagtaatccataagatatctgtagaattaattacagttgagccttgaacagcgcaggtcctatgggatcccaccccttgtacagtcaaaaatcctcataaaacttttttttcttttttttttgagacagaatcttgctcgttgcccaagctggagtgcaatggcgtgatctcagctcactgccacctccgcctcctgggttcaagcaattctcctgcctcagcttcccaagtaggtgggattacaggtgcctgcaccacgcctaactaatttttgtatttttagtagagatggggtttcaccatgttggccaggctcgtctcaaactcctgatctcaggcgacccacccgcctaagcctcccaaagtaggggattacaggtgtgagctgccgcacccggccgacaggtgtaactttttttttttttttttttttttttgagacagagtctcactctgtcaccaggctggagtgcagtggctctctctgctcactgcaatctctgctcactgcaacctctgcctcccaggttcaagcgattcccctgcctcagcctcctgagtagctgggactacaggtgtgtgccaccatgcccagctaattttttgtattttagtagagacggaatttcaccatgttagccaggatggtctcgatttcctgacctcgtgatccacctgcttcagcctcccaaagtgctgagattacaggcatgagccaccacacccggccacatataacttttgactctccaaaaacttaactactaatagaagacttaccaatagcataaacaagttgattaacatatattttgtatgtcatttgtgttatatatgtatttcttaccataaagtaaactatagaaaagaaaatgttattaagagaatcataagcaagaaaaaatatgtttactcttcattcagtggaagtggatcagcataaaggtcttcctcctcatgatcttcaggttgagcaggcaaggaggaggagaaagagaaagggttgccatctcagcagtggcagaggcagagggaagtctaaggggacccttgctgttcaaaattgtgttgatcaagggtcaactatacttgcatgaagctataaatttaagagcctagcctattatgggaacagcaattaaaaaaaaaaacaccagttggccgggcgtggtggctcacgcctgtaatcctagcactttgggaggccaaggcaggtggatcacctgaggtcaggagttcgagaccagcctggccaacatggtgaaataccgtctctactaaaaatacaaaaattcactgggcatggtggcgggcacctgtaatcccagctacttgggaggctgaagcaggagaatcgcttgaacctaggggccggaggttgcagtgagctgccaagatcgtgccattgcactctccagcctgggtaaaaacagctaaactccatctcaaaaaaaaaaaaaaacaccagttgatcctggcaccaggaagatcaaatggcatttgtttgtttgtttgttttgagacagagtctcgctctgttgcccaagctggagtgcaatggcacgatctcagctcactgcaaactctgcctcccaggttcaagtgattctcctgcctcagcctcccgagtagctgggattacaggcacccgccaccacacccagctaattttttatatttttggtagagatggggtttcaccatgttggccagtatggtctcaaactccggatctcaagtgatccacccacctcagcctcccaaagtgccttggtttacaggcgtgagccactgcaccagccagtacagttttttgttttgttttattttggttttttgagacggaatctcgctctgtcgcccaggctggagtgcagtggtgccatctcagctcactgcaagctccgcctcccgtgttcatgccattctcctgcctcagcctccctagtagctgggactataggcgcccgccaccacacccggctaatttttttttttgtatttttagtagagacggggtttcaccgtgttagccaggatagtctcgatctcctgtcctcatgatccgcccgtctcagcctcccatagtgctgggattacaggcatgagccaccgcgcccagccttttttttttttttttttttaatgtatgggggaaaaatgactagaaggacagaaaccaacatataacatgattgtgtgcatttacttatttaacaaataattgagcaatttatttctgtatgatactattctaagcgttttagagttaagcaaactcacagtaaactgtattgcccatgataaaaactgcagttacataatttaaaagcaagaatcgcagcaattcatcaggcacagtgactcacgcctgtaatcccaacactttgggaggccaaggcaggaagattccttgagcccaggaggtcaaggccagcctgggcaacatagtgagaactcatgtccacaaaaattacaaaatagccaggcatggtggcaagcacctgtggtcccagctactcaagaggctgaagttggaggatcacttgagcccaggaggtcaaggctgcagtgagcgatgatcgtgccactgcactccagcctgggtgacagagcaagagaccctgtctcaaaataaataaaaataaaagcaagaattgcagaaagtataaaccatgaccaactcaagagaataatcaatgaaagaataggcagaatgtctttccaaaaagcagttgagagatccccatcctccacatatgcactagtgcagtggggatgttgccaggcatggccgccagacctctagatagaacactgaaggtgagtctgcagtaaagccatggaatgtgctaattttagtttaggaataccaaattttattgaccgtttttaattcaataagcaacccttggccatgtataatcagttcatgacccatcagaagatcctctgtggttcactcatggcctttggactatactctgaatcatggctttagaagacatttttttagtatacttaaatggattttataacttggttgatgcccagattacagactgtgaggagtatctccacataacttgtaactgctatatatgcagtcagcaattccagtatttagcctgatattaatttatatttttcctcataatctgataatacagtgctagcaagatagatcacaaagtgtaaatgagtgtttctggagcatagatgggtacgctcaaatctttgtatcttgttttttaatagagacggggtttcgctatgttgctcaggctggtgtcgaactcctcggctcaagcaatccccttgcctcagcctcccagagtgctgggattatacatgggagccaccatgcctagcttccttgtatcattttttaaaattcaagtaagagaaaatgtctggcaatagttcataagctataaatgaaacctagtcttaggacccagctttatattgcctcaatcaaatattaatatctttagttcaaaatttgtatttacaaaaaacttttggttcttggggataccgttattgccttctctgttgccatccatataatgtatgttgttttttttttctctctccctctgggctgcgtttcatgccagataaacttccaaaccaaactgggatggcaccaggcacaaataacactcttcttatcttttcccccatctaggttacccctttgctttgttttatcggcattaccttttctacaaggagacctacctcatccacctcttccatacctttacaggcctctcaattgcttattttaactttggtgagtaaactaaattagcagtgacaccgcaattagtgggaacctggaaggaacagacttgaacaaaatttccttgagagaatctaataggtagggaagttataatgctcccacttgcaaagagggttgtatgaagaggaacacagcttaacttttcctttttttcttttatgtacattcttctgtcagataaaaacattttgagggtggttacccttgccatacctcatcaacaaagaatcctcagtttctctgtgctgtggatgtaactgaatgaccgagccaagcagtccccacttagattcattcttcacttcagacattcaaaaatacagtaacaagctgggtgtggtagcccggaattcaaggctgcagtgagctatgattgagctactgcactcaagtctggacaacagagcaagtcgcatctctaaaaaaacaaacaaaaaaagaaaagaaataaaataacaccctaataatcttttttattttaataaataatttccatcctctcctccaaaacatgaggttattctgaaaaaaaagatcctgatgccaacattttttctttatatattacgttgtgattggaagtctcaggacggtgggagtgtaaaaaccaggctaaattctctcttcttgcatccaggaaaccagctctaccactccctgctgtgtattgtgcttcagttcctcatccttcgactaatgggccgcaccatcactgccgtcctcactaccttttgcttccagatggtaaacgtctttcccttagcagctcaggctacagctgacagcggttcaggggacaggggtaggcaggggactgtggtatagaaattagcagacctaatttctaacccctctcccagcacttagcagtatgacttcaggtaggtggcttatcacaggcccaagtgttccatccacagattgtaatggtaactctttgcctgcctcaaggaagggccaccagctaaccctttgcatactgtgccattaggctctttggtttaacccactatccaggagcagagtcacttcaaggcaagacagaaaagcaacttagaatgagttaaagaacctaagcctaggccaggcaaagtggctcacacctgtaatcccagcaccttgggaggccaaggcagtcagattgcttgagcccaggagtttgagactaacccgggcaacatggtgaaaccccatctctacaaaaaaaatacaaaaattagccctccagcctgggcaacatggtgaaacaaaaaaaattaaaaattagccgggtggggtggcatgcacctgtggtcccagcatctaaattctcatctcagtttagccctcattttgccaagaagccttgagcaacgctcttcccattacaggttttcagcacctccatttgtaggaatttattaaggcttttaatgatgggatgaggagaaaggaaaaaggaaagagaacattgaatttcagagcaaggagaagaaatagtagtgatgctagaataaatacttctgcctctcctaggcctaccttctggctggatactattacactgccaccggcaactacgatatcaagtggacaatgccacattgtgttctgactttgaagctgattggtgagtgatggtcactgcctgccttccttacatgtaggtccctcccccatctcactaaaaacttcctcggcaccccccctccgccccccgccatacacttctggctgcactcagtctacaggccacatcctcagtgtcctctcccaccaccctacccatccgttctctctctgctcaggtttggctgttgactactttgacggagggaaagatcaggtaagtacccattcatcggcagagaggttcaagacttaatgaaagggaagaaaaaagttgttaacaaaagactgaacccaaattccagagcggagcctctccctcattccccagcctgtgcaatctccctttcagatagcactgagcaaggatcaacaaatctaatttgcccaggatccagctcttgcacaaagtccagagatcaatgccagcaaggcatttgctaaagcagcaacagccagctatgcacacacatacgcatttccacaagaagcaactatttgtcatcccccaaagagaaggctatttgaagaaccccagtcagtggggcacacaggtggggaacactcaaagtggctcttgtggggagattcaaggctatcctgaaccatgcattctcttcttggcatagaattccttgtcctctgagcaacagaaatatgccatacgtggtgttccttccctgctggaagttgctggtttctcctacttctatggggccttcttggtagggccccagttctcaatgaatcactacatgaagctggtgcagggagagctgattgacataccaggaaagataccaaacaggtaattgcccctcttggtccagatgtttgtgtaggtatttcactcactctgaagtgactcttctgaaagctgcattctccagcatgaccctggcatagagacctgagtcatgcaggccctggactgttgtaacaggcactctgtgccaggagtgggccctttttagtttagggttcttccagttatccattctaacactagtacaaacataaaaatccacatttatgccacaggattttgcctgaaccagtcacatttctgcctttaaagcctattttcatgtatatatgaaatatatttatgattgataggtaggtaggcaggttgataggtaggtaggtagatagaggctgggcacagtggtttcacctctataatcccagcactttgggaggccgaggtgggaggatcacttgagcccgtgagttctagaccagcctggcaacatagagagactctgtctctacaaaaaaatacaaaaattatcagacatagtggcatgcatctgtagtccaagctacataggaggctgaagtgggagaattgcttgagtccaggggaggtgggtcaaggctgcagtgagctttgatcacaccactgcactccattctgggcaacatagcaaaatcctgtctcaaaaatatttatcagtaggaaatgcaggagggcacagtggctcatgcctgtaatgccaacgctctgggaggccaaggcaggaggatcactggaggccaggagttcaagaccagcctgggcaacatagtgagaccccatctctacaaaaaaaaattatccaggcaaggtggtacatgcctatagtcccagctactcaggtggccaaggcaaggggatcgcttgagcccaggagttcaaggccacagcgagcaatgactatgcctctgtactctagccggagtggcagagcaaggccctgactctagaaaataaaaattaaaatggtaaaaaaaaaaaaaaaaaaaaagtttaattgccagaagaattccttcactgagaacttgtccatcctgtgtttcagcatcaattcaaccaagaaatgaaggagcagattcaaagtggttatttttattatcttacctccactgggttttcagtcccaatggagattgtgagacctggcaagaccttgagatcagtagcatccctgaggggtaaacacaagactggtccactgtctgctgccctgactttcctacaactcttaagaggtttgcagtccccattcctcatagccagccatagaaatctttccctgaaacaggaaacactttgggcagcagagcttctcatcccattccaggtagacaaccacacccctaaacactcctctccataactgaaggtcagagggtgaagggaatagtctctgctctctgtgaccaggaacttcactcgttcctttccagcatcattcctgctctcaagcgcctgagtctgggccttttctacctagtgggctacacactgctcagcccccacatcacagaagactatctcctcactgaagactatgacgtgagtgtctactaaagcagcagcagcatgactgcaccagagctagaaaatggacaggcaaggatccctacagatagcagagaagtaggaaatatcatctacaagtgcatgttggttttgctctagatctgtgagttgtcaatgccagccgtgctgggacatgttcatcagccagcactgaacaaccttcgcgggcacagggctgtgccaggtgcacatttagcacccgttgccttctctaggagccgctcctagcttgccttatcacatccacgtgacccctcagagcacagcagcttctgattctccatcctattttcttctcttgactgatacatttgggcacttctagggaattcagaaaccaagggaaggggggaagtgctggcttttgctcctgcccagctgaaaggcttgaaaacagttcagtaattctgggcaggtttctctccttaaattaaaatccaatatgggcccctctgtacttaacattccaaatgctcattccaaacactttgccaacgaaggcaaacagtagagaagttaaatacagtgctgcccttgaggctctccaagggaaaggcgaatgaatattctccaggccctctgcttattcctctctgcctattgtgaaggcaatcaggccagactattgagggcatctggcagcaggactcaggcaggtatgaagtagccagccacaagtgtgaaaaggaagagtgctgagagaaactgcctagtcatgtgatatccctaatgcactgtgctttcttccctcaagaaccaccccttctggttccgctgcatgtacatgctgatctggggcaagtttgtgctgtacaaatatgtcacctgttggctggtcacagtaagtagaaaagttgaaacaaggtcctatttagacaagccatgggggccagtatggggagtggcaagagccctaactgagctattccctctcaggaaggagtatgcattttgacgggcctgggcttcaatggctttgaagaaaagggcaaggcaaagtgggatgcctgtgccaacatgaaggtgtggctctttgaaacaaacccccgcttcactggcaccattgcctcattcaacatcaacaccaacgcctgggtggcccggtgagctgctggtggggagcctggaccctggttccttccttccactgtcttcccagattggagggcaggggtgtaccatgtcacccctatgcgtctttcccatctgggcagaaccccctgtcgctcacactgactttgacccccacctatacccccctcccaaaaaaaccattactgtcatatttgaaaaaaaggcaagatataaaagtgcgttaagacctgggtgttactccagctctgccaatggacttatgtcctccactgccctgtttatcaacagctttacttgtttgtccccaccactagagtgtgggcagcttgagtagagtgtctggttcaccactgatctcagcatcagcctcagtcactgctgctgaaccaagtggctcgtgcgcacacggtctccagctccgccttgggtctgctttccatctctaaaagtaatcagtcagcactgcctcctgtaccctctgggggctacacgtgggaacccaccagcactccaatccaatcctcagggtgaggacccagaggcaggtggcgggatgcaaggaccagtcagtttgagggtcgccccacccacccttttctccagctacatcttcaaacgactcaagttccttggaaataaagaactctctcagggtctctcgttgctattcctggccctctggcacggcctgcactcaggatacctggtctgcttccagatggaattcctcattgttattgtggaaagacaggtaggcctccagggtgggggtgaaggggaatataagggacaagatgctgatgagctcctcctccctccccaggctgccaggctcattcaagagagccccaccctgagcaagctggccgccattactgtcctccagcccttctactatttggtgcaacagaccatccactggctcttcatgggttactccatgactgccttctgcctcttcacgtgggacaaatggcttaaggcaagtgaaggcctgcttgtgagactgggagggactcactgcaacctcaaaggttgcaaaggacactccaggcctgtctaccttagtggcctctctctccacaggtgtataaatccatctatttccttggccacatcttcttcctgagcctactattcatattgccttatattcacaaagcaatggtgccaaggaaagagaagttaaagaagatggaataatccatttccctggtaagttaatacagctaaactaaaactaccaccaggttacagaatagagcaacagactggaaaaaaacaatagtattagaaatctggggtgaattccaaggattagcctggctactaaggaacacagtatgggcaatgactactgtgacttattgaggcatgctaggaaacatctggaagggctatagaccaggaattacaggagtaactaaccagccttccaaactcctcttgtcttgcaggtggcctgtgcgggactggtgcagaaactactcgtctcccttttcacagcactcctttgccccagagcagagaatggaaaagccagggaggtggaagatcgatgcttccagctgtgcctctgctgccagccaagtcttcatttggggccaaaggggaaacttttttttggagaaggcgtcttgctttgtcacccacgctggaatgcagtggcgggatctcagctcaccgcaacctccacctcctgggttcaagtgattttcctgcctcagcctcccaagtagctgggaatacaggcacgccaccatgcccagctaatttttgtattttcagtagaaacgggatttcaccacgttggccaggctggtctcgaactcctgaccgcaagtgatccacccgcctccgcctcccaaagtgctgggattacaggcgtgagccaccgtgcccggcccaaaggggaaactcttgtgggaggagcagaggggctcacatctcccctctgattcccccatgcacattgccttatctctccccatctagccaggaatctattgtgtttttcttctgccaatttactatgattgtgtatgtgccgctaccaccaccccccccatgggggggtggagaggggtgcaaggccctgcctgctccactttttctaccttggaactgtattagataaaatcacttctgtttgttcagtttttcaccactagcattcctgactgctctctttcacagttcttctccatcatcagggttctctcctttagcacatgggaatctgggagctaaagcctgccttcaaagcatggaaccaaactgcaaactctgtaacctcctatctgtccctgaagtcccggggaacaaacagttttacaccactggatactttaggaaccccaaaacaaccaggtttgcaagaacagtattcataggataaacaaatagcaaatgtacagccttggcttccccaaactccacagtctcagtgcagaaagatcatcttccagcagtcagctcagaccagggtcaaaggatgtgacatcaacagtttctggtttcagaacaggttctactactgtcaaatgaccccccatacttcctcaaaggctgtggtaagttttgcacaggtgagggcagcagaaagggggtagttactgatggacaccatcttctctgtatactccacactgacctaagaaaagaacagttttgtcagccaactctgtcactcagtagctgtttcagcccttctttagggcaggaaaactatggctgagctagtatttcagctgtgctgttgaatatcaaatccctacaaaggatgaagaaggtcctaactgtgacttccaattatggcagcagccctcaaaggatgtgccctggggcagggtgtggaactgtcatgtgtcttctagctcattgtaagcattgttaaaatgcctactgctctgggaattctatactaagttcagctctaccaagaatttcagggttgagcccagaccttaccttgccatgggcaaaggcccctaccacaaaaacaataggatcactgctgggcaccagctcacgcacatcactgacaaccgggatggaaaaagaagtgccaactttcatacatccaactggaaagtgatctgatactggattcttaattacctaaagtaaaaaagagagaaaagtcagccccagaaacattcccagaaccagccttcaactaacaggtttcaatacctcaccttcaaaagcttctgggggccatcagctgctcgaacactgagcttgtgtaaaagttgaactagaagggggaaaaaagagttcagagctagatggagaccacagtccttctgtccagtcatcgaacaaggaaaaccccatggataagatgagttccctgtgtgctttatatctagactggactcctgaaatgttaggaacaaacagttgccaagcatatggctagctgtacagtgatgggttcagactccctctttcactcagccaggaagctactgcaagaacaggagtggagtttccacaaacatagaaaaataataacagtccttgtcctggtattaatcatgttgttctcccattttctcgcttaaaaatccacatttagttctcccttttcctcttcctcccttcttccctactgacaagttcattctaactttgttctaaggcttcttacccatgaggccacaaaagcggtcaaaggttctgggaattcgggtctggggattcacttcaatcagaacattcttctgtgtatggatataaacctgtagcaagccagctcggttcaggggactatccatcagcatcagcaaactctgagcaaagcagaaaccgagacatggttaaggctgaagagaggcagcactcagctgccaacccttccatacagaggctcaaagggttgtgagcactgtccctggagttacctggtgggtgatatctggccgcgcttccccagggtcccgtccattcttcaacaatatagacttgtgcttgtcacagttgagtagctcatatgtcttccctacctgaagaacagggaacatgacgagagaacagcataagcttctgttacctagccccgtggttcttcaagtgtggtccccaaactaccagcagcagctgcacctggaaacttgttaggcaaattctcaggcccaccctagacctactaaaccaggaacactgggggtggagcccagcaagcccttcgggggattactgtgcagccttatttgcactccccagtgaatggtctgagagggaaacaggaggaagggcacaacctgtgacttcacattatctactaatacactggatttaattaaaaaacctgtggctgttaggcaaggccaatgagacatcctggaactaggcaggagttagtagttagcaaggctgaatgctgtgtttattacaggagcagtaagtaggtactgtgcaaaatatcgagtcaccaccctcagtttgcgtacaccaaacatgcactaagtgaagagctgcaaatctgaacaagaaatgtgaaggccgggcgtggtggctcacgcctgtaatcccagcactttgggaggccgaggcgggcagatcacaaggtcaggagattgagaccatcgtggctaacacggtgaaaccccatctctactaaaaatataaaaaattagccgggcatggtggcaggcgcctgtagtcccagctacttgggaggcagaggcaggagaatggcatgaacccaggaggcggagcttgcagcgccactgcactccagcccgggcaacagagcgagactccatctcaaaaaaaagaaatgtgaaaactaatgatgcaggaggcagtttaatcaaagaaaactctcagaagtaaaaggaagaggggttattcccagttttaagacgggcatgggggcagatgcagtggctcacggctgtaatcccagcactctgggaggccaaggcaggcaaatcacttaaggtcaggagttcaagaccagcctgggcaacatggcgaaaccccatctctactaaaaatacaaaaattagctgggcatggtggcacatgcctgtagtcctagctacttgggaggctaaggtgggaggatggcttgagcccaggagacagagattgcagtgagccaagactgtaccactgcactccagcaagaccctgtctcaaaaaaaagaaaaaagaaagactggcatgagcaaaggtacagatggaatcaagacaaagtagccaggtgtggtggcttatgcctgtgatcccaacactttaggaggccgaggtggaaggatcacttgagcccaggaatttgagaccggcctgggcaacacggtgggaccctgtctcacaaaaaaaaaaaaaaaaattagccaggcgcagtgccatttgctggcagtcccagttactcaggaggatgaggtgggaggactgcttgagccagggaagtagaggctgcagtgaaccatcacaccactgcactctgttgcccaggcaacagagcaagaccctatctcaaaaaagaaacaaaaaagaaaaagtggaaacgaagaaaggaaattttgaggaaaattgggagctgagacactaaagggcagtgattatatatgaagctgctttgtaaaccacagaatcctaatgtatcaagcacaaagccaaaaataattctggagtaagcagggcaggatgggaatgactgacagacactatcctaacaactctctgtacactggaaaagacatcagaagtttgatgttaaagaagtggactacatctgtagcagctaaaagaaataattccaagttgcaatttggagtcccaaggagcattagggtggtcagtaaaaagtctaaaaacaaactgttatatacaaatacaagttttggaaggttaagtttttatgtatcactggaatgtatatgtctagcaacattcttgagatatatggctccaaaaagtctgcgaaaaaagggatgtagattttgaaattgaatagttgaagtaatgtcacagagagcacaaagaacaaatgaccaagaactaagtccatgagacacccttagttatagaagaaaaaaaccttcttgaatgaataatacagtttcaacccattagtaggatataatcatgttttctattcttttaatagattacaggcgcaggcctgtaatcccagctactctggaggctgaggcaggagaatcgattgaacccgggaggcggaggctgcagtgagccaagatcgtgccactgcactccagcctggtagagactgagactccatctcaaaaaaaaaaaaaaaaaaaagtgtatttagaacgaagattaaaatcctggcctgacttctaaaccaatgcgatttcttctgggcctattcaattagttctaacgggtaagagaaaggaggaggaagaacactgcccaaggctttaagatagagaactgctggttctattacatgtggggaaagagatgaatgatagataaaaatgcagatgtaaaagttttaaataataaccaggtctggacagtgtatcataggtggatattagagagaggtgactatggatactaatgaattgaaacacgaagcccttacaaaaagtgtgggcagactaggctacataactacgtttctcatctgcccagtaacttgtcttgggatgtggaatgacgcaaggaacgaaactttcctctgcttagactactataccacagaatcctggtaaaccaattggaagcaaggaggtgagggctagaatatcattcaaaaagagcaaaagaaaatgagtactaccggccgggcacagtggctcacgcctctaatcccaacactttgggaggccgaggcgggcggatcacttgaggtcaggagttcgagaccagcgtggccaacatggtgaaaccccatctgaactaaaaatacaaaaaaattagccgggcgtggtggcacctgcctgtagtcccagctactccagaggctgagtcaggagaactgtttgaaggcgggaggcagaagttgcagtgagccgaggtcgcgcaactgcactccagcctgggcgacagagcgagactccgtctcaaaaaaaaaaaaaaaaagaaagaaaaatgagtactaccatcccaggatgtcaaatcaacgcaaagccaaccaagccaccttccttcaaaagcatctttcacccctctctgctttctacatccactctgggccccttaccctcattccacggagtcccaacctatcgatttactacttctccacttcctgtcccaaactaccttgactgtctccagactggccccttccagcaccacaataagcctacggcctccgatcttgtttcctgcccctagtcggggccgcttgggtggcagagcatcccagtcctgtgcctgctccccaccgcttcgttcacgaggcttgaatccatcactgggcgcggccatcttgcaacaataccggaagttgcgctaacgctcttaaataagaacagcgcggcttctaatcacaaatttccttc

SEQ ID NO: 610 - DNA, 440 bp, Homo sapiens
tttaaattatcactcttttttatgcaggaatatgtggtaacaagttatatggtaagaaatttaaatgtaaagattttgacctaacgttgattcagattgtagagctgtcagttgaaaagggaaacttcatgtttagaaatttgagttctgctgggcgcagtggctcacgcttgtaatcccagcactttgggaggccaaggcgggcggatcacgaggtcaggagatcgagaccacggtgaaaccccgtctctactaaaaatacaaaaaaaattagccgggcatggtggcaggcgcctgtagtcccagctacttgggaggctgaggcaggagaatggcgtgaactcaggaggtggagcttgcagtgagccaagatcacgccactgcactccagcctgggcgacagagtgagactctgtctcaaaaaaaaaaaaaaaaaaaaa

SEQ ID NO: 611 - DNA, 2327 bp, Homo sapiens
gcctttttgtctgtctttatttacagcaaagtacataatatgtggtcactttgtaaccactaacaataaaggtagggtggtaaaaagaaaagggagaggagcaagcatcttaaaaggggggaaaaaaaagcctaagtctgtatttagctactcaccctgctcctgaggcaggactgggtaggcactccctgcctctaagaccacagccaagctgacctggaatgccagtccccggtatgaggaaggcagcagaacgcccagagacaaaagattaaaggggactgagctctggatgcatccacttatgctttgccagacagttcccttccttgttttgtttgaatgcttcccccaccccgccctgagcaaagtgtaaagggcaacggtggtacagaagtacaggcagtcccttccagaagcagtcctgaaccgcataacccacctacctagctgctcctcagcctgccgagttcttggccctggaatctttaacaggcacataggagattccagggcaggggaaaatatttccctgcaagaggctacttccctccaacagctgtgagggccagtgcaggtcaaggttgctaaatcaaggaaagtgcacaagggcaagagaggtcatatacaaaccaaccaggcttccggccctcctgctgcccgactgctccgaggtgtacacaagcctccagcccgacccagcggcctaatgaaactctggcaacctatcctgggcgtggccacaagtatccagctccaagcccaagtgaggcggggagtcaacttccccatgattgccaagtggccaagaccagaagcagggatgattaggctagttctgcggcaaggtgaactggagaccctgtctctgccctccttccctggcctgtcccacagacatcccgttgtttaacccactgcctttgcaaggacctgctctgtccactccaaatcaaaggatacttgcatccttcttacacagactcccatctctctgctcatagtggtcccaggctgcccgagaaaaagaaacttgggtcagtagaaggctcattagtgtgaaggagtgagaggccaggccttcctgtgacataatgcttctatgcttgtttcctaaacacttggtccacacacaatacctgggcaggaagagagaaccaagcaccactggatggctctggagccaggggacttctatgcacatacaaccaacatcaccccactctgctcatctgtgcctccaccctgaacagcagagtacctagatggcaaatgtcatggtttctggtccactaattctactcctgactctccatggaatcagagacccagaggctcttaaaaaactaagaccattgtttgttccatagaaagctcaagttcagatacagagttggccaaatgctgggctgccacggaggggtagagccttccatcccttccttgttccagaaacagtgtgtcacagaccccagcagacactgttcattgtccccagccaagccaccaagaattggtgatcatttgacaaggggcagggcagcccttatagctgtttccaagctaggagtgggctattcagagatattggaggcttggtcccaacaccacaggtagatgaggaagcagctaggtaaaggctcagagatgagaggagtccatcttccaaggcagtgggataaacagccaaggcactaaatggtttggcacctgggagcttcaagtaaagttgagcatgctgcccactgaaaagccaaggctctcccagacacgggtgggcttcacctgagcacagcccagtgccatcaaggccaggggccctgtgtcctcaggatactaacccaggcctgcattccctgcttcatctcagaactgatcaaggcatgactacaaggataatgattgatcctgaactgatcttggtgagcaccggctttcaaaggaggcatcttgggagccttcccttgctccaagtaggcggctgctgtgactgggagctcccttcagagcctgcacggtctcctgaaagtctccgggtggcaagctctgctggggaccaggtttgactttttaaaatagcaaaacagatttagagtcaaactgagcccagaaacggggaatcagactggatggtgctgagtctgggggaaaatctggtgtgaccaggtaataatggagaccaatttacctgaatggctcgaacaggctctgagagcaatgggaagaaaaggttctccaaaatgtttctggcaatggcagccacagtgggatagctaagggcacagtccaccaagcactagggtggtcaacaatgaaatgaacatctc

SEQ ID NO: 612 - DNA, 126 bp, Homo sapiens
ttaagatttctaactacatttacttccttgacgaagcttcggccgtgcgtagactggtcagcttccggggtgactagagcagggctgtggtcactttcactggcatctgggtcctgtcgtaggatc

SEQ ID NO: 613 - DNA, 5775 bp, Homo sapiens
cgggtccgtagtgggctaagggggagggtttcaaagggagcgcacttccgctgccctttctttcgccagccttacgggcccgaaccctcgtgtgaagggtgcagtacctaagccggagcggggtagaggcgggccggcacccccttctgacctccagtgccgccggcctcaagatcagacatggcccagaacttgaaggacttggcgggacggctgcccgccgggccccggggcatgggcacggccctgaagctgttgctgggggccggcgccgtggcctacggtgtgcgcgaatctgtgttcaccggtgagcaacctccgcctgctcgccggacgcttccagtccctcccccaaaccccttgccctgtccccgcgcccctccacgggcctagcatttcctctgagcagcggcctggcctgatcaccacccatctccccacagtggaaggcgggcacagagccatcttcttcaatcggatcggtggagtgcagcaggacactatcctggccgagggccttcacttcaggtaatggcgggcagagcctgctgaccctgacctttcacccttgacgccgacccagcagtggctatagtcggacgtgcaacaggattcaacgctgctcttttcccaccctcctcatccctgcccctaggatagtgggtgctgcgagaacctccagcagcatacaaactgttgttttccagagggacaagagaatctctccttgtctgtggtcgtggagaggagcaggccaaaaaacgcgtggtgaggggaaaccgggcaaggctagtgaaactgcggccttttctttttttttttttggagagggagtcttgctctgtcgcccaggctggagtgcagtggcgcgatctcggctcactgcaacctccgcctcctgatttcaagcgattctcctgcctcagcctcacgagtagctgggattacaggcgcccgccaccacgcccggctaatttttgtattttagtagagacggggtttcactatgtagatcaagctggtctcgaactcctgacctcaaatgatccgcccgcctcggcctcccaaagtgctgggattacaggcgtgagccaccgcgcccggccgaaactgtggcctcttaatacctatccctgtcctctccaggatcccttggttccagtaccccattatctatgacattcgggccagacctcgaaaaatctcctcccctacaggctccaaaggtaggtctgagcacttggtaatcacatggcaggtgggatgatcaaggtagctggcaagaaaccccaggggaatatggtagtgtcaggcctttaggcctctttccacatctgcaagagctgtaacaaaaatacctgcctcctggggtcaaagcagcaaattctgaacacactgtgtttgcgtgctttttactgtctcctccctgacgtgtattcaataagagtattgtttgtccctcgtcttgttcactgcctagatcaaagctttgttttaaagccttttttttctaactgcttgacttactatatctacagttacatccactagtacactctgttctggagaagtttgtccctaagcttgactagttcacctgttctctccttctagaccatacataaaagccgtgcctttgagttccccagacctcttcctcctccccacccacgcacacatatacaccctgggtcaggtagctcacctgtaacctgtaatgtacttctttgtgctatacctagtgcaggtcgcttattcatttactagactgggccctgggaataaaagattcattaaacacaattcttgtcccccaagtccttacaggagacatgattacggtacagcacgaaagcgcccacgttagaggttgcacagagtacagagggggaaagagtagtcagctctgctggtgacggggtttgcagttcaaggcttcacagtgggtgagggtgcatttcagctgtgctgcgtcttgtcttccttgtcagcctgattaactctcctccccccagggtagtgccaggctgtacaccattgcacagggcatacagggaggaacatgaaggagaaaatgcttgggaaagggtgtttggccttgaccagccactgctgacctcaatctcagacctacagatggtgaatatctccctgcgagtgttgtctcgacccaatgctcaggagcttcctagcatgtaccagcgcctagggctggactacgaggaacgagtgttgccgtccattgtcaacgaggtgctcaagagtgtggtggccaagttcaatgcctcacagctgatcacccagcgggcccaggtctgactcccaccaccatctgcgtggtgtcagcctttccttcctaggcccagagtattgggaattaggaaaggcagcttattagaaaagcattgtcaccctagtgccatttccacctaaaagctgtgctaattgccactgtgaaataaggagagccagcattagaactcgatagcactcggtgttaggaagcacagaggaaaatggccaagtcttggcttttcctgcacctcttcgagcagagaggcttatgttacaggtttgcctgacaggaagctaaggcagtgcatgttgtattgagagtgaagggttaggggtcgcaaccttcctttcagctccccagtcccctcaaaccacccctcccttcccctcttcacccctgccctcaggtatccctgttgatccgccgggagctgacagagagggccaaggacttcagcctcatcctggatgatgtggccatcacagagctgagctttagccgagagtacacagctgctgtagaagccaaacaagtgggtgagtcgcaagagccgtggggtgagggcttctgagatgcaggaggaggaaagactccatgggtggggctcctgacccaggacagggtctccctgactctctcccaccacagcccagcaggaggcccagcgggcccaattcttggtagaaaaagcaaagcaggaacagcggcagaaaattgtgcaggccgagggtgaggccgaggctgccaagatgatatccttctgctggagagatctcagcccagcccctagggcacctgagttccccattctccttcatgggcaggctgatgagactaaggcgaatgcgactccgtgctctctggcccttggctccttgttgggggtggggactacagatgagatctgaaatcttagtggtagtacctgagccatgactccccactgtaaggccagatcaatagcattggtggccttgccttcatttctggtgctgcccctagttcctggcagcagcctgcagggaggcccacaggtggggtccacggtagggctgggcacaagccacctgagcgcaaccttggatctgacagcccagaggaggactggagcaagggagtgtggtaaggacagggccagggattgagacctgcccttgcgtgtaccttaaccctcctcaccttggagaagcactgagcaagaaccctggctacatcaaacttcgcaagattcgagcagcccagaatatctccaagacggtgagtgtgtcagcccagcgtctctgatggggctgccttgagaaagtgctttcagttaaggcacattgaggtgagggaattcgaaccttgcttgttccggtttctactcagattggcttctctggccggcgcggtggctcacgcatgtaatccccgcactttgggaggccaaggtgggtggatcacctgaggtcaggagttcgagaccagcctggccaacatggtgaaaccccatctctactaaaaatacaaaagataatgagcccgctgtggtggcgtttagctatattcccagctacgcaggaggctgaggcaggagaatcacttgaacccaggaggcggaagttgcagtgagctgagatcatgccactgcactccagcctgagcaacagagcaagactccgtctcaaaaataaataaataaaaaattggcttctccgatactcctcctgtcaagaatgattcctctgggttccctgaccttttgttctaatcatagctgctgctcagcgctctggatccctaagtgcgagcagaaaccatgtgttactcattgctgcacccctgccctaatctgcatgtgttccatgttaagtagctgctgaattgcaggggtcggaattgaggtctttgcttaatgcaagcatctgtcttatttcctgccctgtagatcgccacatcacagaatcgtatctatctcacagctgacaaccttgtgctgaacctacaggatgaaagtttcaccaggtgagagatgtggccacactgtggggtatcaccaagaacgtgggacctgagtctggttgtttgggctctggagcctgctacagctattcatatggctcagagacattgaaccaaaattagaaaagggggtggttgacagtttctatcttgcatctcataggattgattttatgagatcaaataggattattcacataaaaagcactttaattataaagttttcatctaaccaaaaagtgatgaaagatgatactcagttttcttactcaagagccctcaaactcctctggtgaatggagggatgttaggaaaggagatgagaaatagcagtggccatgagaacatgcctcctcctttcatgagcctgagattcctggctgtcaaccctgtttatcttttctcttgggagcaaaggagggttcaaagctgagtggggcctgaagctgtcaattaacatgtgcatttctcttctctgtttcttgttcatctggcgatctggcaccacaggggaaggtaagctgttgttgcttctgtggggtcctgcaggccaccttctccagtacccgcctcctaccctaccccctttcccacctccccgaagacaaaccctcaatcagggtaggagggtcgtagagggaatggcctagagtgtcctgcctctcacatttatgtcccctaataatgtcattatctatcttttttttcctacagtgacagcctcatcaagggtaagaaatgagcctagtcaccaagaactccacccccagaggaagtggatctgcttctccagtttttgaggagccagccaggggtccagcacagccctaccccgccccagtatcatgcgatggtcccccacaccggttccctgaacccctcttggattaaggaagactgaagactagccccttttctggggaattactttcctcctccctgtgttaactggggctgttggggacagtgcgtgatttctcagtgatttcctacagtgttgttccctccctcaaggctgggaggagataaacaccaacccaggaattctcaataaatttttattacttaacctgaagtcaaggcttcacgtgttcatgaactgggtaactggcagcaagcatgcgcacgttcacatgtgcgctcctgggtctgtctttgtgtgtgccagcagggggcgcaaaagaatctggctggggcggctaaggggaagcaaggcctgggctccgaaacaggacccaagctgggaaggctggccctgagttctcgaggcccagctgtgctcttcacacaccctccatttctcccacatcacccatttttttaaggctggacagccatggctttgctgagccagattaaaaatctgatgaccccaacaggagctgcttccttggcagcagggttccttgtggctgtggggagcctgcctgtgcctgttgaggcacttctgtgcccagaagcccagtggatcgcgtggc

SEQ ID NO: 614 - DNA, 738 bp, Homo sapiens
ctggagcccggggtcctccgctcaactcaggacgttgaggctgcattgagccaagatcatacctctacactccagcatgggcaaaagagcaagattctgtctcaaaaataaataaataaattttgtttttaattagccaggcatgatggcatgcacctgtagtcccagctattcaggagaccaaggtgggaggatcatttgagcccaggaatttgagactgcagtgaactatgatgatgccactgcattccaacctagatgacagaaggagacctcatctctaaaaataaatatatatattttttccaaccactttttatctataccccaatgtcttacattccataaaacatcatgttttgaattccagtataactttatcgttaaacatgtttctttgcagaagcatgtataagttagggtccacaagattatttgcataagctaatttacaaaaaaaattatataatcactgacatgaaagcatgtctgggcagccatgggagctcatatgaggcgtccagttcagtcgccttttaaaaatgatatttgcattagctgggcatggtagcatgtgtctgtagtcccagctactcaggggactgaagtgagaggatgcaccagagccccagaagtcaaggctgcagtgagccatgatcacatcactgcaccagcctgggcaacaggagtgaggccttgtctcagtcagtcaatcaatcaatcaataatggtatttgg

SEQ ID NO: 615 - DNA, 243 bp, Homo sapiens
agggagaccttggctatgaacatttaccctaccggaaactaatggcgtaaccagatttgaaccttttcttccattctgtactaggttgtcttttctttgttaggaaaagcctattataaacggaacattgacatgaattttaatttttgcatattttcttacaacatttgcccttactgcattttataactaattgtatatacttttatattttcctttttgtactcatgattctaatgtttc

SEQ ID NO: 616 - DNA, 283 bp, Homo sapiens
ggctcttgtgcctccactctacacccaagccccccattgccaccagcctttgccccagctccccctgagcacagcccctcctggcagccatgtgcacagatgtacccgcagcagcctctgcctgcacacagagacacggacaagccagtgcctgtccacgtggggcagcccgttaactacagagccaacaaacaagccaggacacgaagacatactgggttccacgacagagtcctgcacaacctcacacaggaggctggccgggcgcggggctcaggcctgt

SEQ ID NO: 617 - DNA, 283 bp, Homo sapiens; identical to SEQ ID NO: 616

SEQ ID NO: 618 - DNA, 560 bp, Homo sapiens
ggctctcgtgcctccacactacacccaagcccccatttgccaccagcctctgccccagctccccctgagcatagcccctcctggaagccatgtgcacagatgcacccgcagcagcctctgcctgcacacagagacacggacaatccagtgcctgtccacgtggggcagcccgttaactacagagccaacaaacaagccagcacacgaagacatactgggttccacgacagagtccagcacaacctcgcacaggaggctggctgggcacggggctcaggcctgtcatcccagcactttaggaggctaaggcaggaggactacatgaccccaggtgttcaagaccaacctgggcaacatagtgggaccccatcttcacaaaacatacagaaactagccagatgtggttgcacacgcctgtagtcccagctactcgggaagctgaggtgggaggatggcttgaccccaggaggtggaggctgcagtgaaccctgatctcaccactgcactccagcgtgggcaacagagcaagaccctgtctcaaatagcaaaaatcaaaaaaa

SEQ ID NO: 619 - DNA, 6395 bp, Homo sapiens
tttgccaactcattctattgcgtgtttaatgttcctgtgaatgcacccttgagatttctctctctcctctccacacagagcttagaagcaaagttaagagactcatcagattctgagctgctgcgggatattttgcagaaggtaagaattccagagtccctgggactcatgaccctgcctcctgaatctctccggaagacctgagagaagaagcacaggtgtgcttgtaccctttaaaaacacccctgttcaaggaacaaaaccattgagtcagcactgcaggtgggtgtcggcacctccaacagctccagctctttcattttctatataagacttagacaaagatatcagaatatacaaaattctgcatgagaggggggaatctagggaaagttttttaaaccccccacagcaaaaacagagatgacaggtgcaaaacagcttctaacatttggtagatgctcagagactttcttttttgcattcgtgaggcctgtcctgcccactcctgtctcttctagacctaaatgggcccttactttgcccagggtggggtttggactcaagagcatctgcatgtaggtgagaggcaggatcaccacccggcccagccacagcctgaccttggccttgagggccaagtgcagatcaccctgcatcctgggtcttcaccttcgaagagccatgagcccttctgaaaagacaaagcaatagactccctcccagaaagaagtgcaccagaagaatacattttccatacaaactctggaggcagacattgtccacccccacccacccagcccatcctaggagccccagtgaagaattcctgtgctagaggtgaaccaagattatccatgtggaaaagatgcagccacagcagggaagacttttggggcaatacagtaggtcaggcttcgagcatggagatacctgaaagttgtcttgcaccctgctctgagtttcacctgagcatcctctcgtagtgtgaagcatgaaatgtaggaatagctgctttaaaacccagcacaaggctgggtgcactggctcacatctgtaatcccaggactttgggaagctgaggtggacagatcacctaaggtcaggagttcaagacgggcctggccaacatggcaaaaacacatctctactaaaaaaacaaaaattagctgggcgtggtggtgcacgcctatagtcccagctactcgggaggctgaggcaggagaatcgcttgaacccaggaggcagaggctgcggtgagccaagattgggccactgcactccagcctgggcaacagagcgagactctgtgtcagaaaaaatgaaaaaccagcaccagcctgaagagcctgtgtattgcgtggggtactttgctgcccttgggcagaatctgcatccctcccagccagcaggcactgcagactgtctcctccctctccctccaggctcctgttttcctaccatcccctgtcctgctgcactagtccctctgccctcctttccaagtgccaggctgtggccacctcagagcttgcaccagctgttgccactgcctggaacttgctcgtcctgcacttgacttctcttggctttagctggagtgtcaccctgagcgtcccctcccctccatcctgtccccagggacacacgctgaaagagagcagttgccgagtgggccttccctcctcttccatagagccagacagttggcgactgtctttactgcaaacgctggttcacactggctcccctgggagggaggtggtttgggcccacgtgccctgtgttcctgctcagaatgggcattagaaatgctgccatagcctgtgccactgcagtggaagcatttttaggaaacggcttatagcttaagacaaacttcagatgcatggggccagaacgctgtgtccatctgcatctttgctgagggatccggtagcctggagtttgccctctgccatgttggcttgaggctcataggcgacttaagacgggctctcgagcaaccaatgttctgtcccttgcagtagactgtgaagcatcctgtgtgtgtgaagcacccgccgtcagtcaagtatgcccggtgctttctctcagaactcatcaaaaaggtcagttatgggcagtgtccgcccagtagcaggacagcatagccacctgcgtgctgcagacctcatccttcccaggccctgggcctgctttgcaaaccccagtatggcaggggcctccccaggcaactggctgcagccgcgtgtgacccatgggagacagtgcagggcgggaagaagggaaggccagcgtctctccctcactctgcctcctggggtttccgcagcagctgcttctctggggccccagctcctagcatatggattctcattcctaccaggctggtccagcccacagcactggaaccctcactcacaccctctgtcctgcccgccgaagggtttggagtttcctgctcttgtccatctctgggttgccccacgggcccctgttggaaggtttagctcttgccatacctttggaactacttccgctggtgaattctctgcattgatcctgctggaatgagctctttcctgactgatacaggatggattttattttttacttatttatttttttgagacagagtctcactgtgttgcccaggctggattaccatggcacagtcttggctccctgaaacctctgcctcctgggtcccagcaagtctcgtgcctagcctcctaagaagctgaaactataggcacatgccaccatgcctggctaatttttttatttttagtagagacagagtttcaccatgttggccaggctggtctcaaactcctgacctcaggtgatccgcctgcctcggcctcccaatatgctgggattacaggcatgagccaccacacctggcctaggatggattttaaagatgagcccgaacatgcagggtttgacataaggatgtcgagaggccattcctcagtaggcagtagcagatcttctgtgtgaaagggccacacttttagcaaataaacaatcccctgcttctccaataccttctttctccctagtcctccccaaaagggtgcatctgtggtcaccagtaggtctgccctgtgccaccaggagagggcagcagtcacccagtgtaccctgctgctgccctgtgaatcttaggatggggccagccgtggagaagcagcctgctgacagccacagcctgcagcatgggccgccctcacagttctgcctgggctcacttaaaagcaccttttgttttcctcctctctgtcatggtcatgtggcagctctcacagaatccttgtctcctgccctagactacacccaaccctacactttcaacacctctctttgaaggccctcccatccaggtttccctaccaagtgaattttttttttagagacaaggtctcttgcccaggctgtccttgaactcctgggctcaagcagtcctcccatgtcagcctctagagtagctgggactattcggcacacaccaccacgcccaacgaagtgaatattttatatggcagctggccggtattacaccattctatcccatatctcccctccaaacttggtgaaaatcatctggccatttttacagattagaacgaaagcaaacaagctctcactctgtctgcccccagcacgaggctgtccacacagagcctttggatgagctgtacgaggtgctggtggagaccctgatggccaaggagtccacccagggccaccggagctatttgctggtatgagaaggacaccctcctccccctcacagcccagatacccttcccgcacagacaaagtgaaaacgtgggtgtgggttcaaatcctgactcacccagtctgcagtcttagacatgaggttcgtcaaccttctttagcctcagtttccctgtctgtaaatcaagcacttcaacaacaacagcatgtcttatagggttgtgaggcatttgtccaataggtgacacactctacctgcttcacaaggacctggtgcccagtcctcaaagaatagttgacaggtccgggtgtggtggctcacacctgtaatcccagcactttgggaggctgaggcgggtggatccgaggtcaggagttcaagaccagcctggccaatatggtgaaaccctgtctctactaaaaatacaaaaattaggccgggcgtggtggctcatgcctgtaatcccagcactttgggaggctgaggcgggtggatcacctgagatcaggagtttgagaccagcctggccaacatggtgaaactctgcctttactaaaaatacaaaaattagcttggtgtggtagtgggcgcctgtaatcccagctactcaggaggatgaggcaggagaatctcttgaacccaggaggtggaggttgtagtgagccaagatcgcgctattgcactcccacctgggcaacgagagtgaaactgtcaaaaagaagtagaaaaattagccagacatggtgacacatgcctgtagtcgcacctacttgggcagctgaggcaggagaattgcttgaacccaggaggcagaggttgcagtgagccaagattgtgccactgactccagcctggggaacagagctcaaaaaaaataagataaaacatagatacagaaaaccacaaaggaaaaacatagcatattgaatcatcacaaggcagccaccccttcatagccacacccggcccctggccacaactgacctgtgctccatcgccagaattccattgtctcaggaatgttcaatgaatggaatcctgtgtggcctgagatgagtgtctttcatgccacgtgacacccttgaggcctgtgcaagctgttggcatgtcaacagttagctgcttctcattgctgagtggcgatttgtcctgtcatggtttattcagccatgtggtggatggctgcttgtcttctaagccacttgccttctgatcgctggactgactctctcgccttctcttggtgctgccctcgggaggctcagtcacactctccaagagcacagccatcatctcccacggcatcacagtcctggtcacatgggatgccgccctctaccttgcagaatgggccatcgagaacccagcagccttcactgataggtgacctcagggcacagggcagggcaccgaggcaggcttaccctggtgcagtcgcagacatgaccccctttcctcccaccaggactgtcctagagcttggcagtggtgctggcctcacaggcctggccatctgcaagatgtgccacccccgggcatacatcttcagggactgtcacagctgggtcctctagcagctctgagggaatgtccttctcaatggcctctcattaggtgcagatatcactgccaacttagacagccccagggtgacagtggcccagctggactgggacgtcgcgacggtcagtcagctctctgccatccagccagatgttgtcattgcagcaggtaatgcccagccccgggcatcctgtgacaggcggtgtccttgcagctctaaccagctcttggctctgggaaaagggaacaatggatgctgttgggcatggacatgatggggcttccagaagagttactctgggcctccagggtgacatcaaaggacaggggtgcctcttaagctgaccttcaagccacagccctcttgttggagacaggcatactcccgttacagtcgtcaccacatggctctgtcccagagccatgcctgtgtgtttcagagaccacaggaggaaaacaaccacttctgggataaggacagggcccttgagagaaggtggtgtttggctgggccacggaaaacccctcacccctgccagcacgctcagtctcctctctggtcgaacagagctctgcctgtggtcctgggtcccagccctgaaaatcacaggtccagcagtggccagggacacaggcccacccctgcaagccagcagacaaatccgcagacacctgaaacacgaagttcatcgcagggtcaggctttgtgtcattcacagccctctagataggccgagaaccagagcacgttttttaaggaacaccagtgagtctggagatttttttcttttgcttcagtcttttgcagctttctctattaagggttctcctttttcacccaagtaattgcctttccatctaatggcccaaatgatcaaatggcatctactagtctcatatgaccgctgcctctctggcctcgcccttctgctgaggtcagcatgacctggaactgtccgctggtccctttcagtaacctgaagctttcaccgtagacgtgctgtattgcccagaagccatcgtgtcgctggtcggggtcctgcggaggctggctgcctgccgggagcaccagcgggctcct

SEQ ID NO: 620 - DNA, 666 bp, Homo sapiens
ccagagccatgcctgtgtgtttcagagaccacaggaggaaaacaaccacttctgggataaggacagggcccttgagagaaggtggtgtttggctgggccacggaaaacccctcacccctgccagcacgctcagtctcctctctggtcgaacagagctctgcctgtggtcctgggtcccagccctgaaaatcacaggtccagcagtggccagggacacaggcccacccctgcaagccagcagacaaatccgcagacacctgaaacacgaagttcatcgcagggtcaggctttgtgtcattcacagccctctagataggccgagaaccagagcacgttttttaaggaacaccagtgagtctggagatttttttcttttgcttcagtcttttgcagctttctctattaagggttctcctttttcacccaagtaattgcctttccatctaatggcccaaatgatcaaatggcatctactagtctcatatgaccgctgcctctctggcctcgcccttctgctgaggtcagcatgacctggaactgtccgctggtccctttcagtaacctgaagctttcaccgtagacgtgctgtattgcccagaagccatcgtgtcgctggtcggggtcctgcggaggctggctgcctgccgggagcaccagcgggctcct

SEQ ID NO: 621 - DNA, 8471 bp, Homo sapiens
gcaacgctgcggctccgcccacgtcatggcgcccgaggagaacgcggggacagaactctggctgcagggtttcgagcgccgcttcctggcggcgcgctcactgcgctccttcccctggcaggtggccggcggggcgagcggagaggcccgcgggggtcgcgggagtccaggggcagacgggatgggtctcggtgctgaaacccctggcgctccggccacgtgcgttcctgggctctccccggtcagggccgcgagacccggtccccgtccctggggcctggccagagtcgctcgcaccccttctgccccgcgagctggcggcggaagctgggggcgtctccaccgccctggggggcagacgcgcgttcggtgtggggcacagttcacgatcattttcacgactttttaaaggcagtaatcgttctggtcactgggacacagctgcgctcgcccattctaaaaagtcagcgccctcaggcccgcgggtaaccaccgcctcctgagcgcggtgaccaggtcacaggctgtctctcatgcctcagtgttctcatctgtatgtcgagcactgcacagaatcggctcatgcgctgaggctttcacgcctgtgatggaagagacagagaagggggtggcctctcctctccctggggacctgccattctcagcataggcatatggcaggcagcagcctcccttctgccagcagaggggcttaatgcaccccgctccatttgtaattcatgtgcagtgagctcactgggatgagtcagtttggatatatattcctccctgtgtctgccccattttatggggtgttgcttaatcatttgcgttattgcattgacataaaatatttagcactcagggatcatttctggtcaggagaaatttgtgcatttttaacccaaaatagaaaccttcataaaagcatcataggtctccattcaatattgactataattgttcacatgcccacactgaatgctaacttgggctcaccctcaacacccacgaggtgggtactattattatcactcacatttgaccagagggattgtttgattagggtgaagtagttgagagttcagacccaggagacagcctgcctgcttcgaatcctggcccaacccctggccctgtgtgaccttgggcaagtgactgcatctctctgtgttattgttttcttattaacaaaatgggggatataatgatacctacctcttagggttgttgtcagcgttgaatacaaaagcctgcggatcagtgcctggctcatggtaaatgcatgtcggtgttagctagtgttttattcagtctcaaaatgccttccgtgagccaggcaccatggatcagctgtacccatgatagatgaggctctgcttgcatgggagagccagagaataaacaaataaatgaataaacaagaaaataccagattagagtggctttaaaaccaataaaacagggaaatagtgaatggagcaactgggaaaaagtgtcaacaaagtcagggaatcagggaagccttccccaaaggggtggcatttgaactgaggcctgagtggtgaagcagccagccatgggaagggtttggggaacaggatatgcaaaggccctgtggtggaaataagccagctgtggttgaggaacaacagcaaggcagccagtgtggctggagtggagtgagcagggtgggccaggggtgagggagaacaggccagagagggggattagcagcaggtcttgtagggccttttatggcatggaaggagctctgaagcaatgaagtgccttgccgtgtgtcacataccagccgagacagtctgcctaactcgggagccaaagctcgctggtgggcttgaggcccctgtaagacagcaatgtaacccaggctggtatgggcacattctgcatttccacttaaactcagatggcaagcccatcaaaccttggtgccatggctgccctggtaattcctggctgaccagtgtaaccagggagctggcccatgacctgggtggcaactgagtagccaggactaatgcggccaagagtcagccttcttcctgtgactcatccaggtgcactctgcgacatctgaaggtcaggctttcagccgctgtggcttccacttccaactggctccacgtccccagggagggatcacatagagctttgccaacacattctattgcgtgttttaatgttcctgtgaatgtgcccttgagatttctctctctcccatccacacagagcttagaggcaaagttaagagactcatcagattctgagctgctgcgggatattttgcagaaggtaagaatcccagagtccctgggactcatgaccctgccgcctgaatctctccggaagacctgaaagaagcagcacaggtgtgcttgtaccctttaaaaacagccctcttcaaagaacaaaaccattgagtcagcactgcaggagggtgtcagcacctcccacagctcctgcgctttcgttttctatctaagacttagacaaagacatcagaatatacaaaaatctgcaagaggggggaaatctagggaatgttttttaaaccatccacagcaaaaacagagatgacaggtgcaaaacagcttctagcatttggtagatgctcagagactttctttttgcatttatgaggcctgtcccgcccactcctgtctcttctagacctaaatgggcccttgctttgcccagggtagggtttggactcaagtgcatctgcatgcaggtgagagccaggatcaccacccggcccagccacaggctgaccttggccttgagggccaagtgcagatcaccctgcatcctgggtcttcaccttcgaagggccatgagcccttctgaaaagacaaagcaatagactccctcccagaaagaagtgcaccagaagaatacattttccatacaaactcaggggaggcagacatcctccaccctcacccacccagcccaatcctaggagccccggggaagaattcctgtgctagaggtgaatcaagattatccacgtggaaaagatgcagccacagcagggaagacttttggggcaatacagtaggtcagggcttcgagcatggagatacctgaagttatctcgcaccttgctctgagtttcaccctgagcctcactctcgtaggtggtgaagcatgagatgtagggagagctgctttaaaacccagcacaaggctgggtgcactggctcacacctgtaatcccaggtctttgggaggctgaggtggacggatcacctaaggtcaggagttcaagaccagcctaaccaacatggcaaaaacccatctctgctaaaaataaaaaaattagctgggcatggtggtgcacgcctatagtcccagctactcgggaggctgaggcaggagaatcgcttgaacccaggaggcagaggctgcagtgagccaagatcgggccactgcactccagcctgggcaacagagtgagactctgtgtcaaaacaaatgaaaaaccagcaccagcatgaagagcctgtgtattgcgtggggtacattgctgcccttgggcagaatctgcatccctcccagccagcaggcactgcggaccgtctcctccctctccttccaggctcctgttttcccaccgtcccccctcctgctgcacaattccctctgccctcctttccaagtgccagcccgtggccacctcagagcttgcacaggctgttcccactgcctggaacttgctcatcctgcacttggcttctctcggctttagctggagtcaccctgagattcccctcccctccatcctgtccccagggacacacgctccaagagagcagttgccgagtgggccttcccgcctcttccatagagccagacagttggcgactgtccttactgcaaaccctggttcacactggctcccgtgggagggaggtggtttgggcccacatgccctgtgttcctgctcagaatgggcattagaaatgctgccatagcctgtgccactgcagtggaagcatttttaggaaatggcttatatcttaagacaaacttcagatgcgtggggccagaacgctttgtccatctgcatctttgctgagggattgggtagcctggagtttgccctctgctgtgttggcttgaagctcataggagacttaagacgggctctcgagcaaccaacgttctgtcctttgctgtagactgtgaagcatcccgtgtgtgtgaagcacccgccatcagtcaagtatgcccggtgctttctctcagaactcatcaaaaaggtcagttatgggcagtgtccacccagtagccggacagcatagccaccggcgtgctgcacaccccgtccttcccaggccctgggcgtgctttgcaaaccccagcatggcaggggcctccccaggcaactggctgcagctgagtgtgacccatgggagacagtgcagggcgggaagaaggggaggccagcgtctctccctcactctgcttcctggggtttacacagcagctgcttctctggggccccatctcctagcatatgaattctcattcctaccaggctggtccagcaaacagcactgggacgctcactcataccctctgtcctgcccgccgaagggtttggagtttcctgctcttgtccatctctgggttgccccacgggccactgttggaagatttagctcttgccatacctttggaactggttcctctggtgaattctctgcattgatcctgctggaatgagctctttcctgactgacatacgatggattttattttttacttatttatttacttttttgagacagtctcattgtgttgcacaggctggattaccgtggcacaatctcggctccctgaaacctctgcctcctgggttcaagcaactctcgtgcctagccttctaagaagctgggactacaggcacacgccaccatgcctggctagtttttgtatttttagtagagacagagtttcaccatgttggccaggctggtctcaaactcctgacctcaggtgatccgcctgcctcggcctcccaaagtgctgggattacaggcatgagccaccacacctggcctaggatggattttaaaggtgggccctaacatgcagggtttgacatgaggatgtcgagaggccgttccttagtaggcagtagcagacctgctgagtgaaagggccacactttcagcaaataaacaatcccctgcttctccaatacctgctttctccctagttctctccaaaagggtgcatctgtggtcaccagcaggtctgccctgtgccaccaggagagggcagcagtcacccagtgtaccctgctgctgccctgagaattgtaggacggggccagctgtggagaagcagcctgctgacagccacagcctgcagcatgggccgccctcacagttctgcctgggctcacttaaaatcacctttcgttttcctcctctctgtgtttgatccaaacacagagctctctgtcatggtcacgtggcagctctcacggaatccttgtctcctgccctagactacacctaaccctaccctctcaacacctcttgttgaaggccctcccgtccaggtttccctaccaagtggaattattttttttttagagacaagatctctgttgcccaggctgtcctcgaactcctgggctcaagcagtcctcccacgtcagcctctagagtagctggaactattcggcacacaacaccacacccaacgaagtgaatattttatataccagctggccggtattacaccattccatcccaaatctcccctccaaacttggtgaaaatcatctgaccatttttacagattagaacgaaagcaaacaagctctcactctgtctgcccccagcacgagggctgtccacacggagcctttggacgagctgtacgaggtgctggcggagactctgatggccaaggagtccacccagggccaccggagctatttgctggtatgagaagggcaccctcctccccctcacagcccagatacccttcctgcacagacaaagtgaaaacgtgggtgtgggttcaaatcctgactcacccattctgcagtcttagatatgaggtccattaaccttctttagcctcagtttccctgtctgtaaatcaagcacttcaacaacaacagcatgtctcatggggttgttgggcatttgtctaataggtgacacacactacctgcttcacaaggacccggtgcccagtcctcaaagaatacttgacagggctggacatggtggctcacgactgtaatcccagcactttgggaggccgaggctggtggatctgaggtcaggagttcgagaccagcctggtcaatatggtgaaaccctgtctctactaaaaatacaaaaattaggccagacgtggtggctcatacctgtaatcccagcactttgggaggctgaggctgggggatcacctgaagtcaggagtttgagaccagcttggccaacatggtgagactccatctttactaaaaatacaaaaattagcaggatgtggtagtgggtgcctgtaatcccagctactctggaggctgaggcaggagaatctcttgaacccaggaagtgtatgttgtagtgagctgagatcaagctattgcactctggcctcagcaatgagaacgaatctctgtctcaaaaacaagtataaaaattagctggacatggtggcacacgcctgtagtcacagctacttgggcagctgaggcaggagaattgctcgaacccaggaggcagaggttgcagtgagccaagatcgtgccactgactctagcctgggtgacagagctcaaaaaaaaaataagataaaacatagatacagaaaaccacaaaggacaaacatagcatattgaatcatcacaaggcagccaccacttcgtagccacacccggcccctggccaccactgacctgtgctccatcgccagaattccattgtctcagaaatgtgggatgaatggaatcctgtgtggcctgagatgagtgtctttcatgccacatgacacccttgaggcccgtgcaagctgttggcatgtcaacagttagctgcttctcattgctgagtggtgattggtcctgtcatggtttattcagccatgcggtggatggctacttgtcttctaagccacttgccttctgatcgctggactgactctctcaccctctcttggtgcagccctcgggaggctcgttcacactttccgagatcacagccatcatctcccatggtactacaggcctggtcacatgggacgccaccctctaccttgcagaatgggccatcgagaacccagcagccttcactaacaggtgacctcggggcacagggcagggcaccaaggcaggcttaccctggtgcagtcgaagacacgctcccctttcttcccaccaggggtgtcctagagcttggcagtggcgctggcctcacaggcctggccatctgcaagatgtgtcgcccccaggcatacatcttcagcgactgtcacagccgggtcctcgagcagctccgagggaatgtccttctcaatggcctctcattagaggcagacatcactgccaacttagacgccccagggtgacagtggcccagctggactgggacgtagcgacagtccatcagctctctgccttccagccagatattgtcattgcagcaggtaatgcccagccccgggcatcctgtgcaggcggtgtccttgcagcattatccagcttttagctctgggaaaagggaacaatggatgctgtcgggcatggatatgatggggtttccagaagagttactctggacctccagggtgacatcaaaggacagcggtgcctcttaaggtgaccttcaagccacagccctattgttggagacaggtatactcccattacagtggtcaccacatggctctgtcccagagccatgccctgtgtccttcagagaccacaggagaaaaacaaccacttctgggacgaggacagggcccttgagaaaaggtggtgtttggctgggccaccgaaaacccctcacccctgccagcacactcagtcccctctctggtggaacagagctctgcctgtggccctgggtcccagccctgaaacccacaggtccagcggtggccagggacacaggcccacccctgcaagccagcagaccaaacggcagacacctgaaacaagaagttcacggtagggtcaggctttctgtcattcaaagccctctagataggccgagaaccagaactgtttttttttttaaggaacaccagtgagtctggagattttttttcttttgcttcggtcttttgcagctttctctactaagggttctcctttttcacccaagtaattgcctttcaatctaatggcccaaaaggtcaaatggcatctaatagtctcatatgagcgctgcctctctggcctcgccctgctgctg

SEQ ID NO: 622 - DNA, 215 bp, Homo sapiens
ctcgctggccgagcccggctgccccacgcacggctcggcagagtcgccgtccacggcggccagcccgaccaccagcgtgtccagcctgacggagcgcgcggacaccggcacctccatcctctcggtaacctccagcgactcggaatgtgatgtatgatagccaaggccgccctcctccctctccttcccctcctcccccactccttcccctccgc

SEQ ID NO: 623 - DNA, 215 bp, Homo sapiens; identical to SEQ ID NO: 622

SEQ ID NO: 624 - DNA, 215 bp, Homo sapiens
ctcgctggccgagcccggctgccccacgcacggctcggcagagtcgccgtccacggcggccagcccgaccaccagcgtgtccagcctgacggagcgcgcagacaccggcacctccatcctctcggtaacctccagcgactcggaatgtgatgtatgatagccaaggccgccctcctccctctccttcccctcctcccccactccttcccctccgc

SEQ ID NO: 625 - DNA, 1384 bp, Homo sapiens
tcttcctcccctctctcttcctctccctgaattttctcctctcctctcaggtcagtccatggtattccgctcccccctagacctctattcctcccacttcttgttgccaaacttcgccgattctcaccaccgctccatacttctggcgagtagcggcggcgggaacggtgcgggaggcggcggcggcgcgggaggcggcagcggcggcgggaacggtgcgggaggcggcggtgctggcggagcaggcggcggcggcggcggcggctccagggcccccccggaagagttgtccatgttccagctgcccaccctcaacttctcgccggagcaggtggccagcgtctgtgagacgctggaggagacgggcgacatcgagcggctgggccgcttcctctggtcgctgcccgtggcccccggggcgtgcgaggccatcaacaaacacgagtcgatcctgcgcgcgcgcgccgtggtcgccttccacacgggcaacttccgcgacctctaccacatccttgagaaccacaagttcaccaaggagtctcacggcaagctgcaggccatgtggctcgaggcgcactaccaggaggccgagaagctgcgcggccgcccactcggcccggtggacaagtaccgcgtgcgcaagaagttcccgctgccacgcaccatctgggacggcgagcagaagacgcattgcttcaaggagcggactcggagcctgttgcgggagtggtacctacaggacccctaccccaaccccagcaagaaacgcgaactggcgcaggccaccggcctcactcccacacaagtaggcaactggtttaagaaccggcggcagcgcgacgcgccgcggcggccaagaacaggttagtggcggggcccgcggcctggctacagcctcagaggcctgggaaggggagaggggttgagatggggctagcggagcggccgctgagagccagggaagccgtgactcctggccagtcggagaaagtttccgcttgtccgggacgcgcggaagagggggccgggctggctgtgggtgtattgattgctttgaccaagaggggctttcgtcagggcagagagtgtgtgcttgcgacccgagtacccgcagcccctgggagacttagccctgcgctgcacccgtgcctgcctcctcagccctgccgccagctcggcgatcctctggagcctagagacagggagggaaggaaagcactctttgccatctggttcttatttctgtgcgttgcaaaaccccgagagaaatccactagcgtcagagagaggaaagtgaacctgggtccctatcacaaggggaaaaggccagaggccactgcgcagcgggcctgtttccccgcaacgctgcacgttgcctgaccgg

SEQ ID NO: 626 - DNA, 446 bp, Homo sapiens
tcctcctcttcctcctcttccttctcctcctccatccccagaacaaaccgaaatcaggatacccaaccatacacacatacaagtccacacacactcccaccccagccaaaaatatataaaaaacaagaaaataacaaattaaccgcaaactatcaacaacccccaaccaccatctaccactacggccaccccaaaggaccccgacgccaacagacagtcaaacgctgatgttgcgggcagaaaacataaaagaggtgacaattgtatactttctaggacaagcacggcttctcctttcggttcccatggacccggcaccccacctgcatgacgatttatttgtatctgggaaaatattctctctagttaaaaatgatttaaagagtcgactatacaaaaatcaatcaccaccacgaggacaagagggcaaaagcaaaacagacaaa

SEQ ID NO: 627 - DNA, 446 bp, Homo sapiens; identical to SEQ ID NO: 626

SEQ ID NO: 628 - DNA, 1381 bp, Homo sapiens
tcttcctcccctctctcttcctctccctgaattttctcctctcctctcaggtcagtccatggtattccgctcccccctagacctctattcctcccacttcttgttgccaaacttcgccgattctcaccaccgctccatacttctggcgagtagcggcggcgggaacggtgcgggaggcggcggcggcgcgggaggcggcagcggcggcgggaacggtgcgggaggcggcggtgctggcggagcaggcggcggcggcggcggcggctccagggcccccccggaagagttgtccatgttccagctgcccaccctcaacttctcgccggagcaggtggccagcgtctgtgagacgctggaggagacgggcgacatcgagcggctgggccgcttcctctggtcgctgcccgtggcccccggggcgtgcgaggccatcaacaaacacgagtcgatcctgcgcgcgcgcgccgtggtcgccttccacacgggcaacttccgcgacctctaccacatccttgagaaccacaagttcaccaaggagtctcacggcaagctgcaggccatgtggctcgaggcgcactaccaggaggccgagaagctgcgcggccgcccactcggcccggtggacaagtaccgtgtgcgcaagaagttcccgctgccacgcaccatctgggacggcgagcagaagacgcattgcttcaaggagcggactcggagcctgttgcgggagtggtacctacaggacccctaccccaaccccagcaagaaacgcgaactggcgcaggccaccggcctcactcccacacaagtaggcaactggtttaagaaccggcggcacgcgaccgcgcgcggcggccaagaacaggttagtggcggggccgcggcctggctacagcctcagaggcctgggaaggggagaggggttgagatggggctagcggagcggccgctgagagccagggaagccgtgactcctggccagtcggagaaagtttccgcttgtccggggcgcgcggaagagggggccgggctggctgtgggtgtattgattgctttgaccaagaggggctttcgtcagggcagagagtgtgtgcttgcgacccgagtacccgcagcccctgggagacttagccctgcgctgcacccgtgcctgcctcctcagccctgccgccagctcggcgatcctctggagcctagagacagggagggaaggaaagcactctttgccatctggttcttatttctgtgcattgcaaaacctcgagagaaatccactagcgtcagagagaggaaagtgaacctgggtccctatcacaaggggaaaagccggaggccactgcgcagcgggcctgtttccccgcaacgctgcacgttgcctgaccgg

SEQ ID NO: 629 - DNA, 1386 bp, Homo sapiens
tcttcctcccctctctcttcctctccctgaattttctcctctcctctcaggtcagtccatggtattccgctcccccctagacctctattcctcccacttcttgttgccaaacttcgccgattctcaccaccgctccatacttctggcgagtagcggcggcgggaacggtgcgggaggcggcggcggcgcgggaggcggcagcggcggcgggaacggtgcgggaggcggcggtgctggcggagcaggcggcggcggcggcggcggctccagggcccccccggaagagttgtccatgttccagctgcccaccctcaacttctcgccggagcaggtggccagcgtctgtgagacgctggaggagacgggcgacatcgagcggctgggccgcttcctctggtcgctgcccgtggcccccggggcgtgcgaggccatcaacaaacacgagtcgatcctgcgcgcgcgcgccgtggtcgccttccacacgggcaacttccgcgacctctaccacatccttgagaaccacaagttcaccaaggagtctcacggcaagctgcaggccatgtggctcgaggcgcactaccaggaggccgagaagctgcgcggccgcccactcggcccggtggacaagtaccgcgtgcgcaagaagttcccgctgccacgcaccatctgggacggcgagcagaagacgcattgcttcaaggagcggactcggagcctgttgcgggagtggtacctacaggacccctaccccaaccccagcaagaaacgcgaactggcgcaggccaccggccctcactcccacacaagtaggcaactggtttaagaaccggcggcagcgcgaccgcgccgcggcggccaagaacaggttagtggcggggcccgcggcctggctacagcctcagaggcctgggaaggggagaggggttgagatggggctagcggagcggccgctgagagccagggaagccgtgactcctggccagtcggagaaagtttccgcttgtccgggacgcgcggaagagggggccgggctggctgtgggtgtattgattgctttgaccaagaggggctttcgtcagggcagagagtgtgtgcttgcgacccgagtacccgcagcccctgggagacttagccctgcgctgcacccgtgcctgcctcctcagccctgccgccagctcggcgatcctctggagcctagagacagggagggaaggaaagcactctttgccatctggttcttatttctgtgcgttgcaaaaccccgagagaaatccactagcgtcagagagaggaaagtgaacctgggtccctatcacaaggggaaaaggccagaggccactgcgcagcgggcctgtttccccgcaacgctgcacgttgcctgaccgg

SEQ ID NO: 630 - DNA, 446 bp, Homo sapiens; identical to SEQ ID NO: 626

SEQ ID NO: 631 - DNA, 382 bp, Homo sapiens
gcgagggctgggaactgcgcggcggggactgcgggcgactccggcatccgcgctggcggcagcggtcgccgcgccgtgggaagctatggggacgcgccctttctcggggtgcccattcagcggcggctcggagctccctgccccgctgctttaggaagcgatcgtggagcagagtcactctctgaagactcccgagacccattcgactcgggaccctcatcgccgaccctttcccgggctcccggagcgtgaagaagagccgcctccggaacgcggcgaggagcatggggagagcggcgcgcacgcaggcggcggcggaggggcgcgcgctggctcccgtggctggggctgtgcttctgggcggcagggaccgcggctgccc

SEQ ID NO: 632 - DNA, 296 bp, Homo sapiens
cggtggctcacgcctgtaatcccagcactttgggaggccgaggcgggtggatcatgaggtcaggagatcgagaccatcctggctaacaaggtgaaaccccgtctctactaaaaatacaaaaaattagccgggcgcggtggcgggcgcctgtagtcccagctactcgggaggctgaggcaggagaatggcgtgaacccgggaagcggagcttgcagtaagccgagattgcgccactgcagtccgcagtccggcctgggcgacagagcgagactccgtctcaaaaaaaaaaaaaaaaa

SEQ ID NO: 633 - DNA, 5167 bp, Homo sapiens
taatgacacttcttagagtgtagccagggctatgaagccaacacactattcagtaaacacagttctgccagggggtcagaacagtgtgatccaggctcagctctctgctgctttggcctcatcctcgggtagattttacagtccctcatctaaggaaggggctatgttcttctagcagtcctccctaatgatttcttttactcaaatatttgggcactggaaggtttaacaagttcctggaagacatattaccaattaaagatctattcatggctgggcgcggtggctcacgcctgtaatcccagcactttgggaggccgaggcgggcggatcacaaggtcaggagatcgagaccatcctggctaacatggtgaaaccccgtctctctaaaaatacaaaaaattagccgggtgtggtggtgggcgcctgtagtcccagctactcgggaggctgaggcaagagaatggcgtgaactggggaggcggcttgcagtgagccgagatcgcgccattgcactccagcctgggccacacagcgagactccgtctcaaaaaaaaaaaaaaaatctattcataagctcccactgcagacaaatttgagggctcttttaacaatccagttaacttgcttctagtcattggtatacacacctagggtccttattgcacgggctctgtcatctttcctgtgtctaaatacaaagtaatgcggtcataaacaccagatacatgttaatacaagaaattattatataagctccttttgaaaggagactgagctttagggaaatgtctatggtaccaataaaaaaactcattcatgcactcattacattgaatcaagcaccaggcattatggtgagtgtgggggtaattgggtaggtaccctgtttatgtcctttaaaattcccacctgacctcattttcagatgaagacacaggtagtggggacatggaacccaaatctttaaggctttgaaattctgggtgattgccacaaagattatgaggcctgacaaccagtcagaatgaaataagcctggggtggtttttttttttttttttttccatcagcttttaggttcaggggtacatgtgcaggatgtgcaggtttgctacaaaggtaaatgcgtgccatggtggtttactgcacaggtcatcccaccacctaggtattaagcccagcatccattagctattcttcctgatgctctccctccccctcccccacaggccccagggtgtgttatttccctccatgtgctcatgtgttctcttcattcagctcctgcttataagagaaaagatgcagtgtttggttttctgttcctatgttagtttgctgaggataatggcttccaattccattcatgtccctgcaaaagatatgatctcattcttttttttggctgcatagtataccatggtgtatatgtactacattttcttcatccaatctatcattgatgggcatttgggttgattctatgtctttgctattgtgaatagtgcagcattgaacatgtgtgtgcatgtatctttataatagaatgatttatattcctttgggtatattaaacctgattattaaaggctttgaggattttctagcctctttgtgttcactggaagtttaatttttataaatttcccccttcgttttcttttgtcatcatgacagggagttgagtagacattgtatgtttttcttcattgtttcagattttgagatacagagtgaaaatggggagaactgtaatcaagacatgtttgagaatgaatcacgtaagatattctcggaaatgcctgaaggtgaaagtgctcagcactccgatggggaaagtgactttgagagagatgctggcatccagaggctccagggacacagcccaggtgaggaccacggggaggtggtttctcaggacagggaagttggccagctcataggcctgcagggcacctacctaggggagaagccctacgaatgtccccagtgtgggaagaccttcagccggaaatcccacctcatcacacacgagaggacccacacaggagagaaatactacaaatgtgatgaatgtggaaaaagctttagtgatggttcaaattttagtagacaccaaaccactcacaccggggagaagccctacaaatgcagagactgtgggaagagctttagccggagtgccaacctcataacccaccagaggatccacacgggggaaaagcccttccagtgtgccgagtgtggcaagagcttcagcaggagtcccaacctcattgcacatcagcgcacccacacaggagagaaaccctactcgtgccccgagtgtggaaagagctttggcaaccgatccagccttaacacgcatcaggggatccacactggagaaaagccctacgaatgtaaagaatgcggcgaaagctttagttacaactccaatctaatcagacaccagagaatccacacaggagagaaaccctacaaatgtaccgactgtgggcagaggttcagccagagttcagccctcatcacccaccggagaacccacacaggagagaaaccctaccagtgcagcgagtgtgggaaaagcttcagccgcagctctaacctggccacacaccggagaacccacatggtggagaagccctataagtgtggggtgtgtgggaagagcttcagccagagctccagtctgattgcacaccagggcatgcacacaggggagaaaccctacgagtgcctgacatgtggggagagcttcagctggagctccaacctcctcaagcaccagaggatccacacgggagagaaaccctacaaatgcagcgagtgtgggaaatgcttcagccagcgctcccagctcgtagtgcaccagcggacccacacgggcgagaagccctacaaatgcctcatgtgcggcaagagcttcagccggggctccattctggtcatgcaccagagagcccatttgggagacaagccctacaggtgccctgagtgtgggaaaggctttagctggaactcagtcctcattatacatcagcgaatccacactggggagaagccctacaaatgccccgagtgtggcaaaggcttcagcaacagctctaactttatcacacatcagagaactcacatgaaagagaaactttattgaagtggcaaagagtgaaagtgagggactggcctggagtgggagttgccacactgccccaacagtgattccctttcaaagagctgtgcttcctaaacattctggggggttttgccagagtcttccccttgctcatcctcatttccaggacactgtcattttagtggtctgagtcaagtcccgtatacattcaagaacagggcataggcgtggaaggtctggaaagttgggtctttttcccttacattgggtgacttgattggccccctctcatgattcctctgtgcctcagtttcctctttggtaaaatggggggaaatgtttctccatgtggaatggaagacagcatggcccacaacgtgggccgagtcctcagagaaatactggaaatcattggtgtggttctggttgttttgttgttttgctgccacgttgttgggctaaggtgccttcaccccaagctgttagtgttccagggcaccccaagctgtcagttagaatctgctcttctggctttggtgtcttgggctttgatttcaggtcaagatggaggggcttctccagttctgagtcacccacgtgaaggtaaagaccctttctatttccagaaagtgtcaggagcacagaaacttgaggaagtacagcctggagccagtgtcccagtgtcctttccattggtaagagttggacagggccttcaggaaaggggtaaaccgaggacatttcagtgcttgcttttgtctctgcctactgtcctgtggtagatcagctaccaggggaacacatttgttctcgtggggttttgtcctggagagtgtagtgaagtccgagagccctagctgccaacccatggtggatggtaacttctgtctcatcaagagtaaaacagtcctgcacacagcagggtgggtttgtgcctttggcccaacaggtacatagccccataatttctgaattattctatgcacttgtttccctcttcttttattttttatttgatatatgccgagctagaatcctgtcgggtagcttttgtatactaagaacattattattattattatttttgagacggagtctcactctgtcacccaggctggagtgcagtggtgccatctcagctcactgcaagctccgcctcccgggttcacgccattctcctgcctcagcctcccgagtagctgggactacaggtgcccaccaccacacccagctaatttctttttttgtatttttagtagagacggggtttcaccgcgttagccaggatggtttcgatctcctgtcctcgtgatctgcccgccttggcctcccgaagtgctgggattacaggcgtgagccagcgcacccggccaagaacattatttttaaagaagtgttaactttgaggacatatctgttccctggagatatttgggcttgaatcaggagtttgtcctacaggtgtcgcccttgatctcaggatgctaccagggctttgttctcgggatcctcgcacctggagagtgaagacgggcatgacggcaggtgaaggggtttgctgtgaaggaagaggagataaggcatttccaggaaatgggaaactgcctcctcctacacatggggcctgtgctcagaatgggcttagttcttataggatggatgctcagtattccttaataaagtagagttccattcttttcctgagtctgtcttttactgtgttaaaaacctgaactaggctgggcgtggtggctcacacctgtaatcccaacactttgggaggctgaggcgggtggatcacgaggtcaggagatcgagaccatcctggctaacacggtgaaaccccgtctactaaaaatacaaaaaattagccgggtgtggtggcgggcacctgtagtcccagctacttgggaggctcaggcaggagaatggcatgaacccaggaggcggagcttgcagtgagccgagatcgcaccactgcactgcagcctgggtgacagagcaagactccatctcaaaaaaaaaaaa

SEQ ID NO: 634 - DNA, 307 bp, Homo sapiens
ataggccgggcgtggtggctcacacctgtaatcccagcactttgggaggctgagacgggtggatcatgaggtcaggagatcgagaccatcctggctaacacagtgaaaccccgtctctactaaaaatacaaaaaaattagccgggagcggtggcgggctcctgtagtcccagctacttgagaggctgaggcaggagaatggcgtgaacccaggaggcggagcttgcagtgagccgagatcgcgccactgcactccagcctgggcgacagagccagacgctgtctcaaaaaaaaaaaaaaaaaaagaa

SEQ ID NO: 635 - DNA, 8417 bp, Homo sapiens
  misc_feature (2138): n equals a,t,g, or c
  misc_feature (2140): n equals a,t,g, or c
cgggttcccagcctcggagggacccccgagttcctgctccagcgccctctaatggccaagacctggggagcgcaggagaaaagcaggtggggaaaaggccatcaatggatggatacccaaggacacttccatatgttcggtggggagggcaaggggggcagagcgtgggaagatgcaccaagcccaggcacccgaggcccgaggtgccagccgtagaggagagaacccaacgcaattccatatgttcaagaggcagatccaggtaagagtctgggctatgtagccagatcccctaagttcaaatctcagctcagccacttacaagctgcatgtcttcaggcaaattactgaacatttccaggcctcggattttctcctctctgaaatgtggattataatagtatattcttcataggattgttaggattaaatgaattaagacctgtgaaaggcttcgaacagtgtctgaccaacagcatacactcaataaatgctggccatcatcatcatcattttaacaagtatgaatttcattatctgccaatattatgagtttaaatttgcacatatatattggaattataattaggcaaattcctatatgctatttaatctatagaattgaatttaagcaatctattagtggcccaacataaacctctatgtgttctttaaatatacaaacctttgatatttacttactatgtgttcttaacacataaaactcttagatatttagcagcatgtcttttatctgaatctaaagaactcactgcaacattaagtgctgacaatgcagaagattctgctttgctcataaaaggtctgggaatatcctgctgctttccagctggaaatcttttatctagtcatttatccaagcaaatagacattaattgtcctactttctttctttctctgtcaagcactattatgccacaacattcgattttgacgtttttattctggaccccaattttgtggctgcatgaagccaaagggtctttatgaaaaattaatatttatttaattaccaaatataaaagctaatgactgaatttttcctctttcgctccaatttttgccaatttgtattgtaaatagacacagaaaatatacgggagcttaaagcatgatttggagcacaggaaaacctgaaccaaaggagagaacaaaattaggcaacccattcattatcaagaatgtattataggttcagggagcttcaattgtgctattgttgctattgttaacacaacaacaatgtgcttttatggtacccagcgctagcccctctcatcacacctgtcactcctattgtgtttattctctatctttctgttgtctttctttaaggttcttgtctatattttcagtatcctcctatttatttagcactgaccaacgcctagtgtgtgtttggatgaaagaacaaacattcattttgaacttattatataaaatcttatataactttgaatttattatataaaatctttaagtgatttgctcttaatttccattttcaattattcctggaactaggttgtatcccattttacaaatagataatctaagatctaatttgaggttaaaataaattgctaaaatcagtttaaaactgataagcactaaatatctagatggtacctgaaaaatctcacttttaccaagattctgaattgaacattattagcaaaagcttaaactgccaagccaccaaaggaaatgcagagtacgatatcagtctctgaaacctcttatctgttgtgaaattacagtggtacagaatatccaaccatggtgacttaaattaataaagacaggctcttagaatcttagacattgtcatttctttgctctagtttcactgccctttctgtgttttccatgtccaaagttttcttaagttctgttgaaaataaatggcttgcaaacatgagactatcaataattaaggaatatcattgtaagccatcatgacatgtggattctgctgttgcctggctgggcacatgggacggacaagaaagcagaatgagtacctagaaaagaagaaagtaccatttattcactcattcattctctctctctctccctccctcctcccttttttttggtgtgtgcaagggccacancncccacccccacaaacaactgcatgcacacacagatgttgattacatgccaggtactgtgataactgatctaaatacagtatctcatttaattctcaaatgttacagatttttatgctctgaacccaaagtgtgtcttacaatcaatagtatgcaagccttatgtcataatctaattagaagcatttttctttcataataactcaaaatcatggtgcatcttgccagcaaaagtgtgacagattggaaggaatacagcattctctccacatcacagaggaagaaacacctaaagagttctagagcaaggaaactgactcaaggttatttcacttttctaaagcctaagcttctaacccgatgattcaaaagacatcttttcctcttgctcagaataaataattttacccttttaagcttccattttctcttgcaaacattttcttgtaggaaataagtatcaactactgtcagaaggaaactactaaaaagattatttaaaaaacccaaaccttgaagctagcaaattttaactgatctgagaagagacagcacgataagtatacattctcacaaactataaatgactccacaaagtttaaaagcacagtatatctctttctctttcatatatctcaatcttactgttgtaaaaaatttcagcaatcccttcataaacaatgaacaagatgtatcattagaattaatttaaggtaccttttctttgaattcagtggctgtttaaggcagagaacaaactttttctctaaagccataatatttcacagcatagcttcaagccaaaacttaaaggaggggtagcaaatccctatttggacttaggattaggaaaggcagactgcatgcgttgagcatttgttgcagtcaaagctgccagtacctgaagaagcctttaggcagagtagaagaacttacagtaagttcttttaggagttctcttgaggcagataagctggggggatagctcgcctggctcaaagctgctgcaccccagctgtctcaagttttgcccctctataacttcagttagaggagacagaagtagacttcatcagcctcagtttcctctgtcaggttccccgtgacaatcatagtgtggctcccatgggaccacttacagctaaccaaaagagaatgtccttgaatttctagcgtagccttgctaaaatttttagtaaaggctttcaaaggaattacacacttctaaaaaccttagcctcaatgacttcaacagggagatatttatataaagcccatatttaactcctcttaggccagacggatctcattcactcataataacactttcttcaactctttaccaacacagggagacactgtgcagtaggagagaaatatgagaaccccaatctcaggattcaaggtctggggatcactgaaggaaaggtaataaaaaggaacattcaacagtgaaaacaaccatgcttttcatttcaggtttctgtaaagctctggctgaaataatgcataaaagagaatgctgagctgttttatgaaagggattcaaaaatcaaatcaaattaatatttcatctttgatggcttacaaacctaaaagaattttctgcatccacgcgataaacccacagagggcaaaaaccacttgaaacgatgaaatgcaaaaatcacagtatttacttccgttttccctagtgctgggaaactgaaggtgaaaaccgctaagcaaactactggaaaggtgggtagggagcctttgcagaggaaatttcacaggagaataagagcaccttattaactttttcagctatcaaaataagcctcaaacgacgttggtatcaattttctgtactgggtttccattcatacaagtaaagcccacagatgtggcccatgccaagtacaaaaccctctttggaggccctctgggcaagatccattttctgtcagcaactttcaacttctcctctgtccattgttgtccaaatccagcagtcctcggagcttttccatcgagacagttcatcgtcatgacgcccactaatagcagaactgcaaaaccctgacaaagctacccttcccctgggagaagtaagcagatttttcaaactctgtatatggaaaaaaaattgagacaaaagtctgcacatctgaactatacctattagagtgcccttgccccactaaggccaggtggaaattttgctcttgagaaaccatattaattctgccgagtgaatagggaagaccagagcagacatttcataaatatagtcacatcactaattagacatattgtgtttcttttttttaattgacagcttctctgagctataattcacatactacacaatttgcctacttaaagtgtacagtttaaagtttttagtatattcacagaaacatgcaatcatcactaaaattttagaacattttcatcgccctaaaaagaaacaccacacccattagctatcacacccagccctcccttgccccccactgctccagcccgagacaatcaccacctaatttctacctccataagtgtgcctatttgagacctttcatataaatggagtcatacaatatgtgtgcctggcttctgtcacttagtatgttttcaaggttcatctgtgttaaagcatgtgtgagttcttccttcctatttatgaccaaataacatttcattgcatttctagatcacattttattaataatatttacccatgtattggtggatggacatttgggttgtttctactttttggttattatgaataatgctgctatgaacattcatgtacaagttttgtgtgagcatatgtttttgtttctcttggatacatgcctagaaatggaattactggatcatatgttaactctgtgtttgaggaagtaccaaactgttttccaaagtggctgcaccatttcacattctcagcagcagtgtaaggattccaatttctacacatcttcaccaactcttgttattatcacagataatagttgattttagccatctgagtgtgaggtggtacctcattgtggttttgatttgcatatccgtgataactaacaaggttgagcaactttccatgtgcttattgttggacattggtgcatcttttttggagaaatgtctacttagatactttgcccattttaattggcttatttttctttttattattgagttgtaagagttctttatgtgttctagatataactgccttagcagatatatgatttgcaaatattttctcccattctgcaagctgtgtttttccttttttttttttttaagacagggccttgctctgtcacccaggctggagtacagtggcacagccatggctcactgtagtcgcaatctcccaggtccaagcaattctccctcctcagcctcccaaatagctgggactacaggcacacgccaccacccccagctaatttttgtattttttatggagatgaggtatccctgtgttgcccaggctgctctcaaactcctgggctcaagcaaccctcctgtcttggcctcccaatgttggaattacagatatgagccaccatgcctggcccatttttacttttttgatggtgtcctttgatgaacaatagttttacattttgacgaactccaactcatctattttttctttggttatgttgtctaatacaaggtcacaaagagttatgtctatgtttatttctgagagtattataattttagctcttacattaaggctttcgatttattttcagttgctttttgtatgtggtatgaggtagggggtccaacttcattcttttgcatgcggctattcagttgtcccagcaccatttgttgaaaatactatttgttcctcattgaatagccttggcactcttgtcaaaaatcagttgacaataaatatataaggttatttctggggtctcaaccctattttactgatgtttttgtctgctttaatcccacaccacactgtcttgattactgttacttttcagtaagttttgaaattaggaattatgagtcctccaactttgttctttgtcaagattgttttggctatactcagtaccttacatttctatctgaattttagaagcagcttgccaatttttgcaaagaagccagttggaattttgatgaggattgtattgaatctgcagatagatcaatttaggaaatattgacatcctaataattttaagtcttccaatccatgaacatgcaatgtcttttcatttatttacattttctttaattttttaacatttaattttttaattgataaataaaaactgtatacatttatcaggtacagcatgtcattttgaaatgaggatacattgtggacagctacattgagctaattaaaatatacataacttcacatacttatcttttttgtagtgagaacacacaaaatctactcttaattttcaggaatgcactgcattgttattaactatagtcaccatgttgtacagtagatcttttgaatttattcctcctacataactgaaattttgtgtcttgtgaccaacattttcttttacttttaagcaatgttttgtggttttcagaatataagttttacatttcttttgttaaatctgctcctaaataactcattcttttgatgctaatgtaaatgaaattgtttccttaatttgatttttgattcattgctagtgtatagaaatacaatagatttttgtatattgatcttgtaagatcttgcaaccttgttgaacatatttattagttctaatagtttttataattgattccttaagattttctccatagaagatcacataatctgtaaatataaatagctttacttcctcctttcctatctgaatgccttttatttcattttcttccttaacttccctgggcataatctccagtgtaacaaagaataaaagtagcaagagcagacatcctttccttgttctgatcttagggagaaacaatccagtctgtcaccattaagtatgatgttagctgtgggttttccatagatgccccttatcacattgtgtttttaatcttcaattacttaaatggtagttgagccaaaattcataaattcatttttgggttattgacaaacttgttttttaaaacaactttcagaaaacttacaaaaatatgtaatttttaaagtatatatttaatttaacggaaaacattattgagcatccactctgtgccaaggcctgttctaaactctggagacatgtagggaataaaagtgactaaaattcctgcccagattgagtttacaatctaacgtgggaaacagacaaaccaataattaagcaaattgtacagaatgttagaaggtaaaaaatactacagagaaaaatgctcagcggagaaaggaaaatgaggagtagggagaggagttccatttttaactgagggatcctggataaagtctcattgacaaggggccatttgagcaaaaacctgaaggagcaacgtgaacacagcattagggggattaaatgatactccagttgtacactgtccccatctattcagtaaagaaagtttaccaggagtccaggataataaaaatcaaaacattttgtaacaagaagaaacttcaaaaattaatcagttcaccttgctctctgaataagatagcttaagccagaaaaaaataaccactttggacaagacagtgacagacgggttgaaaatcttaaccagtatgctaaatactgcacttttaacctgaagattttgtttgtttgtttcaaaagacatgcacaattccaccagataatgaaatccacaaaataagttttacaagcgcaaacatactctaggaatctaatggtcggagcatctgtggagaacatcaaccctactgtctatgagaacttaggtttcaaaaatccattaattaatcaaccttatagaaactagtcattgtgaagtaggaagttaagaaaataacagaataatagcataagtaataatagtaaagattaaagtaatagtaagagaaataacaatagctcatagaatgaattgctgtattaaccaaggctaaaaagaatttaagtagcccccccgaagttaaaattggaagagaatattaactgtctctcccaagaaacattaaccatatctaccctcctcatattttgtaggctctgtaaactcctgttcgtttcttccctgcacagctgcaagatcacaagacagagacgcataacctgcaaaccaagttttcccagacatgtaagacat

SEQ ID NO: 636 - DNA, 931 bp, Homo sapiens
atacaagtgtcatatcccccagcccatgcaagaagcaaaatgggaagagactaggaggtagcctgggcaagagctgacagctgagaatcctgaggtcagagagaccttaggatgtcaaggagctgaccctgcaagtctccggacaggcagctgggccttgtaggagagatctgacaggaaaaggaggttcacatgcaatagggttataagctaggggacacaggaccctagggacattctcaccagctaaccattcccacaggttgcagaatttcctggtcagaggtggaaatggtatatagggcaaacaagtttgctgaggtcttgggagagggtgagtggtggacataccaggtgagggaaacgagaaataaaaagaactgcagggatgggaaggtgctgacatccgagagtttgctattatgtgttcagagactaagctactaaattaaggttaaagaaggtggccaaggcaaaaaaaaaaaaaaaaatcaggtgtacagatcagatgtagtaggcaggaaggcaggagcaaactagagagagagagaagaaaagtcgtggccttaccaacaacccaaaagccctgaattctctggtgagataggcaactctggaggttgaggcagctgtagctcagccaagaattagaaggatgattctagatatttaaaatcaacagcatccccacccacgtaacccaccttcaggaaccagtagctttaaccaagagaacaagaaactcaatgagcagcagcctcaacaactggctctttcctcctgggtaaggagagggcagtggggaaggacggtgcctcaaagggaagtggaggcgctatcaatctggcctagacaggtaggttgactgcttttacatgggtgggctggggcctggtctgggacccctgctcaaaaaaaaaaaagaaaaaaa

SEQ ID NO: 637 - DNA, 931 bp, Homo sapiens; identical to SEQ ID NO: 636

SEQ ID NO: 638 - DNA, 527 bp, Homo sapiens
gagcagaaactgaatctgagatgactctttccccactttggtgtctctacagagacccaccttcctgggatccctatattgtacacactgggatccccacacctctccagggcctccctgtttgcccggggctggttcctgtccagtgggggatgtcactgatggtgcccctaccccattcccacagtgtgtacctgctgctccacctgcaggacctggaaaggtgagtaagcagccagcctctccgcagcgtgctggactctcactcggaaagagcttctaaccaggagtgggcacctgaccctggggctccctttcagctgcatggtcatagggaggggtcaggaggttaaccctttataacagcaaacacagtagcttacagttcctgtgggctagaaatctgggagcagcttaactgggtggttctagctcagggtctctcaagaggctgcagtcaagatgtcagcctgggctgagttatcggagggcttgacgaaactggagggtccactttcaagatggca

SEQ ID NO: 639 - DNA, 527 bp, Homo sapiens; identical to SEQ ID NO: 638

SEQ ID NO: 640 - DNA, 128 bp, Homo sapiens
cctgtaatcccagctactcgggaggctgaggctggagaattgcttgaacccgggaggcagaggttgcggtgagctgagatcatgccattgcactccagcctgggcaacaagagtgaaactctgtctca

SEQ ID NO: 641 - DNA, 128 bp, Homo sapiens; identical to SEQ ID NO: 640

SEQ ID NO: 642 - DNA, 319 bp, Homo sapiens
gctgagttcctgcaaggccttggcaacctccaggactgcagtgtggcatgatgtgggaccagactgtggctctggagggcagtgcagggctctctccaatgcatctctctgccttcaggcacgaaaccagaaaacagggtttggaggaactgagtcccaggcttgcatgtgataataaattttatatctgcaccagatggcaggcagcttattaaaagaatgggctttagtgtcagctagacatgggttcaaatctgggccacttatttgctcaggtgatgattctatttttgagacagggtctcactcccttcaccca

SEQ ID NO: 643 - DNA, 1986 bp, Homo sapiens
gttattcacccaagcccctctttacttccccagctctgtgtcccaaacctccatcagccccagccaaaatgcttctctcaaagatatactgttggattaagtgagaaggagttgagggctttttgtgggtctcctgttgtcttgttctttaggatcgagaatgccagacggagcctcctcccaggacaaacttttcagccacagccaatcaggtaagaccctgggccagcctgaaacctcttaccacccacctctatgtatcctttcctcatttagcagcaaaggcaacactgggtcaagggctcctctggcagtctgccctcctcatctacttgcctccctgctcactgtcctgagcatccaggctctgaacaccaggcacatgagacagtaggtccctatccagtgagctgtgggccagccacgtgactcaagggcaaggttgtgcaagctggaaacaggcatggcttctggatggagcttcttccatgaccaggggagaacatttgcttcgatggactctctggaacctgtggcaccctgtgactctgtgactgactccaaagtgttagcactctgaccctgccctcccagcagccttcagtgttcctgcagcccccctcctcccccttcaagtcctcctggatggccacacttatttgaacaggatatggtgccaggagacctgatctcagacctcacattttctgttcatactttaagatcctgagcaaaccatgtcacttttaatgcctcagtttctttctctctaaagagaggatgacaagctgcctcacagagttgttggagggtctgaatgagataacaaagattagagtactttgcaatgtggaataggagactgggggggagttattaaatgtaaggtttgcttatctgacctccaggtggcagtgacttcccagctctagggagcacacggtgtgatgaggggcatttgcccagccccagatccttgctgcttcctctgctactatccttgggcttctcttcctgtcagatccatttagcaaatgttcccttaccttttgcttatctccttttaatgctgagatgtggtcagtgccatagacagccagcccgagccagtatgtttatgccatgtccggggtgggggtggggatatgaagatatatatatatatatatatatatatatatatatatatatatttgagacaaggccttgctctgtcacccaggctggagtgcagtggcacggtcttggctcactgcaacttctgcctcctgggctcaagcgatcctcccacctcagcctgctgagtagctgggactacaggggcatgccaccacacctggcgtatttttgtattttttgtagagatggagtttttgccatgttgcctaggctggtcttgaactcctgggctcaaacaatccacctgcctcagcctcccaaagtgctggcattacaggtgtaagccactgtgcctggcctatttttttaaatgttctagttcagagtcttttaaatcaccaacaaaaatgggaactagcctgatgtttgcccatttgttctgcctgctgggggctgcatgctagaacaatgttgatcttcagctgaagacccagcctctgggtttcagggtatgtaagcccagcccagagatgtccttagaactctttcattcttgttccagagctgatagtagggaagacaggtattgaatacctaattccaacaggccaagtagaagatgcttgttgccagggttaacatgaccaattccttaagtcttgaaggctgaaaagagctgtctgggtaaagattgcaccttacaatgatccttcttatctcacccttgcctagtgggagatctatgatgcctatgtagaggaacttgagaagcaggaaaagaccaaagagaaggagaaggcaaagaccccagtggctaaaaaatcagggaagatggccatgaggaagctgacatctatggagtctcag

SEQ ID NO: 644 - DNA, 112 bp, Homo sapiens
gcctataatcccagcactttgggaggctgaggcgggcggatcatgaggtcaggagatcgagaccatcctggctaatacagtgaaaccccgtttctactaaaaatacaaaaaa

SEQ ID NO: 645 - DNA, 1631 bp, Homo sapiens
cccatccaggcagcacggctggctgagcagagacaaggtaagctctggagaggccaggcagagtggaggggggtgcaatttcttaagtcatgggaattaaggccaattgaggcagggatttcacctccaaatagtggtttgaaaccactgaaatggaaattgctaggaaaacagtaagaatttttttttaaaatccatgccattttccccagggctgcccacactgggactggtagaggaagccggccctgacggatgggtggtctcgcccttcctgggttcatcctgctgcaggtgggcctgagtcgcagatcaggaagcaccgggaagatgcaggcctgcatggtgccggggctggccctctgcctcctactggggcctcttgcaggtgaggggccgctctggagggaggcagccaccaggacccccgacagccctcctgttctctcccctcccgcatgcatccccaggctgctaggaaaccttagagccctgcagctggtgtcgggtgggcccaaccggcacctgggtggtcctcctgggtgacagctcttctcttcctttgcaggggccaagcctgtgcaggaggaaggaggtaccgttctccaatttctttcctttcatttgcataagtaactggtatgcagcggggagaaactgctggggagagcagcagcttcttatcccaagcagacgcatcaggggccctggctcagctcaggcccaagcatggaaaacatggcccttgagagccagcttggagctgtgcaagcagagggtctatgagctccttccagctgggaccctgccctccagccaccagggaacacactgggcagggggagccagggccccatgacccctgacattcccactatcagacctgggttccagcccccaggccctcccaactctgagccctagctcagtccagtatcttcagggctgctcttgcccaagctttaggacaggttatacggggggtagcggagtggggtgtctgtgctctgttctgaaatcccagcaggtggctgctggtgccccacaccctccccacacaactccttcctcaaacaggacagggcttccctccctctcttccccttcttcttcttcctctgtctccccgaccagatatccccaaggatctgagaggggatgggctcaggcccccactctgggaaggttgtatcactgtaggtagagctgggaaccatccacttgccttgagacctctgaggatggtgtctccaggcaggaccatggggacagcccccaaggcaggtgtcttgtgtctttcagacccttacgcggagctgccggccatgccctactggcctttctccacctctgacttctggaactatgtgcagcacttccaggccctgggggcctacccccagatcgaggacatggcccgaaccttctttgcccacttccccctggggagcacgctgggcttccacgttccctatcaggaggactgaatggtgtccagcctggtgcccgcccaccccgccaggctgcactcggtcgggcctccacaggcatggagtccccgcaaaaacctggcccctgcaggagtcaggcctggtctcacgctcaataaactccggactgaagatgcacaa

SEQ ID NO: 646 - DNA, 1631 bp, Homo sapiens
cccatccaggcagcacggctggctgagcagagacaaggtaagctctggagaggccaggcagagtggaggggggtgcaatttcttaagtcatgggaattaaggccaattgaggcagggatttcacctccaaatagtggtttgaaaccactgaaatggaaattgctaggaaaacagtaagaattttttttttaaatccatgccattttccccagggctgcccacactgggactggtagaggaagccggccctgacggatgggtggtctcgcccttcctgggttcatcctgctgcaggtgggcctgagtcgcagatcaggaagcaccgggaagatgcaggcctgcatggtgccggggctggccctctgcctcctactggggcctcttgcaggtgaggggccgctctggagggaggcagccaccaggacccccgacagccctcctgttctctcccctcccgcatgcatccccaggctgctaggaaaccttagagccctgcagctggtgtcgggtgggcccaaccggcacctgggtggtcctcctgggtgacagctcttctcttcctttgcaggggccaagcctgtgcaggaggaaggaggtaccgttctccaatttctttcctttcatttgcataagtaactggtatgcagcggggagaaactgctggggagagcagcagcttcttatcccaagcagacgcatcaggggccctggctcagctcaggcccaagcatggaaaacatggcccttgagagccagcttggagctgtgcaagcagagggtctatgagctccttccagctgggaccctgccctccagccaccagggaacacactgggcagggggagccagggccccatgacccctgacattcccactatcagacctgggttccagcccccaggccctcccaactctgagccctagctcagtccagtatcttcagggctgctcttgcccaagctttaggacaggttatacggggggtagcggagtggggtgtctgtgctctgttctgaaatcccagcaggtggctgctggtgccccacaccctccccacacaactccttcctcaaacaggacagggcttccctccctctcttccccttcttcttcttcctctgtctccccgaccagatatccccaaggatctgagaggggatgggctcaggcccccactctgggaaggttgtatcactgtaggtagagctgggaaccatccacttgccttgagacctctgaggatggtgtctccaggcaggaccatggggacagcccccaaggcaggtgtcttgtgtctttcagacccttacgcggagctgccggccatgccctactggcctttctccacctctgacttctggaactatgtgcagcacttccaggccctgggggcctacccccagatcgaggacatggcccgaaccttctttgcccacttccccctggggagcacgctgggcttccacgttccctatcaggaggactgaatggtgtccagcctggtgcccgcccaccccgccaggctgcactcggtcgggcctccacaggcatggagtccccgcaaaaacctggcccctgcaggagtcaggcctggtctcacgctcaataaactccggactgaagatgcacaa

SEQ ID NO: 647 - DNA, 398 bp, Homo sapiens
ggccccacttactttatttcacaaatgaagctggttttattttgattcctggggagcactttcataaactctttcataaatgtgcaacatttccatccacattggcatcaacaagggattttatatcctgggcaggctcaggactggctttctgtgtctctcactcatccatttcccacaatgatcctagggggcactgcagttcccccagattacgggtgaggaaactgaggcagagacatgcggtcacagcctgacttgttaaggtcacacagctggttagggggtagctagattctagtccaggcacccccgctctgggccactaagctgggcagcacacaaacccacagtcagggctaggctgactccacaccatgacacacccctgggagcag

SEQ ID NO: 648 - DNA, 398 bp, Homo sapiens; identical to SEQ ID NO: 647

SEQ ID NO: 649 - DNA, 20097 bp, Homo sapiens
tgtgattcaaggttatagctttactgcaactcaggacagtgagcccaagccaggtgttgggctgggccccagaacaaggctcaaatgcggacttggacacacttcgaaggagggctgctctgcccctgctgttcgggcgtggggggtggggggcgggggccactgagctgggccttctgtcctcctccctggatgtgcagacatgggccatggcttctgccaggactcacatgtgagctgggccttctgtcctcctccctggatgtgcagacatgggccatggcttctgccaggactcacatgtgagctgggccttctgtcctcctccctggatgtgcagacatgggccatggcttctgccaggactcacatgtgagctgggccttctgtcctcctccctggatgtgcagacatgggccatggcttctgccaggactcacatgtgagctgggccttctgtcctcctccctggatgtgcagacatgggccatggcttctgccaggactcacatgtgagctgggccttctgtcctcctccctggatgtgcagacatgggccatggcttctgccaggactcacatgtgagctgggccttctgtcctcctccctggatgtgcagacatgggccatggcttctgccaggactcacatgtcctcctcactgaacaccagagacacctgctaacttgggaagacgcagggtgaggatttctgtttctccagcccagcctgtcaccctgtgggaagcagcgagtgggaagggaaaggggaagtcacatgtttctcacgccgagttccttccagaatcccaaagaaggctcagaaggttgtgaaggaagaacaaagtcagctcaggtgagacaccccttccccaccctctacactggtgacacacccaggatttcggggataaaatggggccatgagggatgtggccaagcctcccaggaaccagcaaagagcacgcctgagtccagcagatgctcgcagggctgtgacgtccagtgcaagggcacgtttcagcactttttctgagggccaaaggctgggcgatctgattagctgctcccaccctagagacagcccgacagcctcggcacaagagcagggctgtaggaaagccatcatcaacaaagccaggcccagagccatcccacctttccctgcaggcttagggttttgagctgagacaggggcagactgtagcccccagtccctgaggttgctacttaaggagatgcttttgcagtgaggggtggggcagcagccaccaggcttcaggtcaagaggaggcggcagtctcccactggcaccagcaggagggggtgccaccgctcacttaatgtactggttcctgcccaggtggggggtttccgtgaactgtaatgcagggcccgccatcgtctcctcaaaaacgatgacctgtggagagagggcccggctgggagggcagctgacgtctgtcctggagccaggggaggtgctgagaggtggcagggtcagaaggaaagggtttgggaaccaggctggaagggacagggaccaacaactcgtctgcagcgaggaggagggaggaagaacccgctgacacgcccctccaccctgaccgaaggctccctgggacggcaggtgggcagggcgtcatggggaacaggaaggggctggaagctcccacctggttgattccgctgctcaaccagggacctgggaggtaaagcgtcttctggggtccaatgttccagtaacgtccaaggttctggccattgatgaatacaacccccttctcccagcccttgaaacagaggggaagggtgttcatctaccacgagagccacagcaaaagtggagggagacatgcatgcgtgcttctctcaggtccaggagaccaaagcgagctgtgtctggacagccatgagggtgggcaggtgggatgctctatttcctgtccccctagtgcatgaggtgtttcttctgctgggaacccactcctctggcccagggaggccccagcggccctctcagaccctctgggcacagaagccaccaacgactctcgccaagctcgtggctttggctcagagccctccaaggcgggaggcaggtgggagaaactggcagggaaaagggcgttaccaacctccagcttcagaaaggtgtcacaaggggtggagctgatggacaagctacccaagaagaaagcaggtaatgtgggtgtttctgggagggaactccatttgtccaggccgaacctaaggacagaacacagagaaggagagggaggaggcccttctcaatccaccagcacaataaagcaaaataaaaggccctgacaccgtttccccatccaaggccccccgcctcttaaccaggacacagaatggcagcacggtaggatgctgggaattcctagtctgcaaatgcggcttctagtgcgggtgccacccctcacctcggccagccgatctggcccctggaggcgttcacacctgggtgcgggccaggccacggtgcaccagggacccctgggccccaccacacagcactatacctgtgagtgcaagggctggtgctgggcagggacccacctctgaaagaagctcttcttcatatccaggctatagattctgaagtttttcaggggtgaatcattcagatagagatttccaattaagcctgtgggagggaggcaggacacgtgggtagcccaaaggcaggggccgagtcagctgggccggggccacgaggggaagccctgggaagctggggtgaggggtgctgaagtgtacgctccctgagaagctggggtgaggggtactgaagtgtacgctccctgggaagccgttcgcttgcaagcaaagctccctagcaattctgtgggggacgggaaggaggaagaccctaagatttgccatgggaaggatatagagctgaggtgttacagggcgagaacaacctctggcctctctctgaaggaagttccagatgaccgagagggttctggcctagctgcagggccagtttcagtggggcccaagctacacagacctaataactcagccagaatcatctctgccacctaggattaaagctgtgcattaggagtgtttggactgtgagcagatggcaccctccctcgggcatccaacagggaagagatgtgtcctcttgaggagccactcatcagtgtcccggggccgggccagccctgccagtctcagattacagagctgctgagtggctagcttgggaatttggaggccgaggactgtggagaggctttgcagggcctacagactccgaaatggcaggtgcgggtctatgtgggcacgcgcatttctcaagggaggtctgtgacttataaacattgaactgtgatccagaggacaggactccacagtgtgggcccaggggaccctcaacaagggctcagggaagcaaagttaggaacaatggtcaggctggtgctccttccaactcccaggagaacaacagaagtgaggacaggcccagagagggagctgtctagggtaaaggagtgtgggcctgggtggtgctagatgccgctctgaggcccatctagaagggccctgatccccaggatccaggccccagtgtctgggccacgtggctttcctggcaggccaccagacggctctcggaggaaatgtggaccaataagagctcttcaagtttcctccgtcacaaacgcagacaccgtgagagagctgggaggtcaccggtgctgctcaccacagtcgcattcattttgttctgagttctttttttataacttacctgaaaccacccacatttagctagattttttttaaaaaggaagggctaaatttgggcacggtggcgggcgcctgtagtcccagctactcgggaggctgaggcaggagaatggcatgaacccgggaggtggagcatgcagtgagccgagattgcaccactgcagtctggcctgggtgaaagagcgagactccgtctcaaaaaaaaaaaggaagggctaaattaaagcataaaagatttagtaggccaggaaacataaagcaaattggcggcctattcccagaggggtacgctaccaacaggtgttttgtttgctgtatgtcccgcatcctcctcccccaacatctgagataagctttcccaagatggatcaagaagagaacttcagtgtggaggcccaagaaggcaggggtcttgtgcctttccttggattcctggaaatcacattcattgctcctcactgccgcccccccaagcagacatccttgcagaaaccgactgcagcccaggggagacaagaggccagctcagtgttcacagtgtttatcacgagcacgcagacgatgcacgcgtgcagtgctaacaggacaggggccacagcccagcggagtttctctggcccactcagaactggcctcatgtatgggacaacccagcctccacctccctgcaagaggcctccatggcctggtggcctgctagcatagagaagcaatagccacctgtgtgtccagcatggccactcttcttttgacacattctgggacccacctttgcgctggtcatcaatattctccccatagttgactcgcccacgattctccaccaagatcctcagcacggtgtaaccctgccgggaacacggggctaacgatgactgtcagaaggccacagctgcccctcagaatttgcttgtggaccccagttcttccctacgctctggggatgggagtgtacatcccagctgggcagaaagccacactcgccctctccacctacagcttgtgggtaaggagccacgggtctcccaggttttcctcagtgactgcccccagacttcctcgaagcagcgggggctagccatcacccagctcccaaaaacaacgaacctggatcagggggacagcaatcttcgttgtcttgtagtccaagaatcctatggatactgtgttcacaaacacctgccaaagggaacaggcaggaacatccatgaccaacaggaggagggtaagcgggacctcctccaggccaagaagggcagcacgcgtgcctgtaggcagacgaggggccagtgggcagagcagacatgaatgccccctgaaggctcacagagctgactcagaagggccattgtcacacactggtaagagctgattctgaggggagggcatgagacgcctattgcagagctgctcaccagaaggtcacaggaatttagaagagaagctcctacctgcccccgatcatgcacgtggccactgaggatgccagacgaggtgatgctggtctcatagagaatgtacccgaaggactgtccatttcccccattgactggcaggttctccatgttgatgggcttttcagacttgattggctgcgtacagaagagatggaggggtgggcaggctcaggaggagtggggtcacagacagactctgcctgggggctggcacatggggtggaagcggaggtttggtgggtgttttctactttgacttctcattgcactaaacatacaactctccagggtgacggggaagaggagtggggcaaaggggtgtgcaccagcagagtgcagtccgcaggcaggggacacacatcacagcctcagtccgccggaggaggcacccccttcttggggaggggacggcctgttcctctgcccctcactctcctctctgaggctggaggaaggaaaggcccacggggccagccgctgttcctcagggacctctgtttctcccacttcacactccagcatgagtctgtcctcttccctctgagctccaaggccggagagcagaccccagagccaccaggcactggcctgcctccccccacactccctgtctggaggggctccaggccctgctgccccgacgactctcacctcccgccgacgactgcccccagcactcacctccctgccaacgactgcccccggcactcactcacctcccgatgactgcccacagcactcacctcccccaggtacttgagggcgtcccacagagacaggtacaagactggcgttaagggctcatacggcatcttgggaagaaggtcaggtgggggagggagagggatgcctgcaacacagaaaacagggtcacccccaacggacccaaatgtcactgcctgctcgtcctccccacccggctcccatccacagacccgatgtgctcctgcgtcccagcaccaagaggaacaacaggctagctctcagcacctgctgaggccagggaggaaggccaggcctgggggaaagccagggcgttctcccgtcctccacaggagataaggagcgttaacacctgtaacaggtgaagccggcaagatggaaacagcctcacacacctccctgtccttgtctaggatattcttgcacgcagatcaactggggtcgaggtgggacagtaaggaagtaactctttaggggtctgagagcagaagcgagggcctgagttggaacttgagtctgctgtctgctgggtacctgagatggagccgaagaagtctcgaagcttcatgtacttggccgtgtaatcgccggcttctgtcagcacagcatcatagtctgcaagacaccgggccctgtcatggtcattcctgtccccagcacagcacatgtagcacgaagaacagggagaagcttggaagggccacaggtcttcatctcagccattggggaggcaagacacttttgagccattcagtcaaaatactgtaaacatgaaagaccaggcaactacaacaagcgtccataaggccaggtgcagcggctcacacctgcaatcccagcactttgggaggccaaggcaggaggatcgcttgtgcagtggctcacacctgtaatcccagcactttgggaggccaaggcaagaggatcgcttgtgcagcagctcgcacctgtaatcccagcactttgggaggccaaggcaggaggatcgctcgaggccaggagttccagaccagcctgggcaacatagcgagacccccacctctacaaaaaattttaaaaattagccagaggtgggggtgcacacctgtagtcccagctactcaggaggccgaagcaggaggatcacttgagcccaggtatttgaggctgcagtgagctatgatcacactactacactccagcctgggtgtcagagtgataactctctcacaaattcaaaaaaacacaaactgtccatgatcacagcatggccctaaatttctagctgcaggtgtaatttctactttctgggactctcaacctaaaggaggcaggatcacacctcctcaagggcctgggcagggaggggaggccaccgtccctccctgtccccctagggcggtctccttccacttcctcaggccaacctttgccaaagaggcctctctgtagagtgaccagctcacaggcacaccacctcccttgaggcttccctcctctgggagtgtaacatgactgtccaggcaagtaccttctccaggtactctattgccaaagacacgaaggtgccagaagttgaccctgagggcctctccatagcaagtcccagccatgcccatgcagggcagaccagggagagcagtgctgatgaatacttgccatagctggtgacatctgacttgtagtcatggaagtgcatggctccattcatgaagccaaagttggtgcctccgtggaacatgtagaggttgatggaggagccggcgtccacaatggcagacacggttttcaaaacctctgccggaggagggagaaaggggatgtgcagagtgagttaaagtctgagatgagccggggtcccttcactactctcctctttcccagtcccacctcaaaacctcaaggccaactttgtcactctgtccttctagctctcataaaaccccaatcacagaagattaggggtggaggaggaagtgtgggccagaatcatggccccagagctcgagcctccagttgtctgtcaatcctggtcaagtctctgagctccatgtggaccacctgcagcccaggtcggccagggccttccagccagcacagtctccatgtgagtctgcctgaccaggtgtatcaagtgcacaaagatgggatgcatccttagagagaaaactctgacacctcctattctacctttgttaggaaatgaaccatgacataacaagatcatagcaaaggagaaaaacaaatggttaataaatatatattttatcaatataaatcaaagaaatgcagactaaacaatgatgtactgagtagacaaatattaaaagttattttaatactcggtgttgctgaatctgtgggaaatgggtgcacccattcagcagcagcggctgaagctgccgtctttccgggggctgaggggcgagcatgcacatctacacggtgccgaggagcccctgtgccgctcatcccagggaaagccgggtgcgcagagcgcaggctccgggatgctcaccgggatgctcgccgggatggcgtgcgcttaacagaaccaccagaaacaacccgggagactgtgtccacaaagtgtggtttagaatggggctcttcacattctttaaaacagtcatgtaaatctgtatttggtcatacagaaagctgtccgtatgtgcattaactggcacaagcaggtgacatgcagcggagtgtgatggcatctgtctctatctgtgtgtgcgtatagagctgtcggcagagatacagagagaactgcctgcgtggtaaacagctaagtgttttctctgtgctctgggaattttatttcttctctatactttttctgtattttctggatgtttgcaataggcatgcattacccttctaattacaaaaacacgaacaagcaatgttaaaagccctcccattcatccaagtgtcaagacaaatgactcaggaatatccaaagccaacttctgcacacagataatcccagcagccttgcaccccctatggcttacattagttagcaggtgactgaaactcatcctcacttcttaagtagcacacattctggatgtagtcaccgcaagcactcaccagaagaatccaagatattgtgagggcctccccacgagtcaaaccaccccgtccagtactccatcaccatcttgggctgagtcccctggacaccacaaaatgagagttagacaagcaggctggccagacaaaaaagagggaagctcttcatggaggggagccccaggatctctgccctctctactcttccctgtctgcatacccactgccttagaggtctttggaggtggggcataggtgagggccaaattcgcctgcacaccagttctcctgccacatgtggcctcctgcaggtatagagcagataaagctcccaaagtcgatatggcaaaccctgatggttttaatgttgcatacgtgttagcaagaagacactggtccaggatcaagccaagctttgcctgtcctcttccagggaagggggatgttttacccaggacaactccatatctgagagggatactgtggatgcagatccctcccccccaccctgggtactggctccattagcagaaaaatcagacgctgcagagtgggccctcttcaaggtccaactcagtttaaacagcagtttgcagcattttctgaaccagaaaatcagggccttacagcacagctattcatggtgcaggttctgcactgacagtttggatttataccttggctgggccactcaacaaatcttaaatcttctttctgaatactgactttggcataggacggccccaaggaggccaagatcattcctgggaccatgctccactctgccacgtttgcagaagcccagagcacctgggggaggtgtaaagactaacacgctagtatttcaggctctgcatgagagagccttcctcacttattcagtgacagcttgtcaagtatctctaggtcagtgatagccttatgtttagagggataccgcatacacagcaacaaaatctgatccagggggatgggacaaactcacggtccattgagtagaaggtaccagccatacccgggttaaagccaaagtagttacaagaattcttctagcaagactggcggcttggttttctttacaagccacctaccttccaagaaggagacataccataccacgtttaaatcactaaaaagggagaagcagattcaaagtcccacaagtcagaaatctcccatgccagaagcaaggttgttggcttgagggtaccagagctgcggaggtgggtgtccacccatgggccaggccactgcactgcacaactggctaagagctggagctctgtagtgagactgttctgcagtccccaagccactacttacagggtgtcttatacactctatagctgtctccttcactggctcatatgactattgggagaattaaacgggagagtgcacataacacccttagcacactgttcctggcaggtaggaggtgctcaagaaacacttgcatagttctgtccatcacgggtcatggacacagaggacgagtgaggtgctatcggacatcgccacatggagcacacctggaggcctgtgctgtgcattcagagagcccttgatttaaacagggaggtgtccaagtccccttccttcaggaaaacagacatctctggactgcgcacataaagcccttcagcagggccattctgttagcaggacagctggcctgggaaggctcgcgcgtggctacccctctaaggatgaccttgaaggctaaacataaggcattctgctgtatcagctgctgtgctaggcactttccaaatattacctcatttaatcttcaaacaaccctgtgagttgacaccataaggaaatgtactctcatcatccccacttagaagaagagagacgcacagagaggttaagtaacttgcccaaggtcacacagcacagggcaggagaccctgtcatctcagtcacaagtatgagaggcaccccccactccactgcacacatgggcaggcactcaggaaatgccaagaaaggaaggcagagacccagctggatcgcgcctgatctgcgtcacaggagcctgcctgggagcggggccagccctcccacctcctcctgggagcctcctcgcctactctggcagctgaactccaggagaagccacatcaaacacacacacggccccacacggctgtggtggctccacgcagatgtgcctgaggacacagcccctgctctgaaaggccatcagccggaatggaaagcagcccagcgtctccacagccatccatgcctgtccatccaagcacaactccactccaggcccaggaccagtgtgacgatgcagcgtgggggcagtctggagcatccacgcccctcagtgagccaggggacagctggggcctctcaggtctgcagagggctgcagcatggccctgtccatccacctgcttcggaggggcacgcgagctcgagaaagaggccagtcagaactacagggtggcataaatgcccatcagtctgacagatattgagggacatctggaaactcctccctctctccgcacctggagtggaccaggctttctgccttgctgatgacaataatctttctaggattgcaggggcctcacaggttaaggtcggatgcctgtgtagtataggacagggaagtttttccttcccccctcaatccctgggagcaagtctggagctagttgaggccacaaaagtcgagtcctctaggagtgcaccaaaagggcccctctctcagggcagtgggtgatgtccacactgcatcagcctacacagcagccctcagaggtgtttctgggcagcgggccttgcaggcacacagtggcatgggcggggggccagaggccatcagccctgagtccagctccctgcgctggggaagctgagcacgctgacaggcattcagaattcccataggccgctgagcagggcgggccgcagcttccctggggctggacttacctggacgttgaagagaaaggtggtcagtagctgcagctcgtgtgttgactgcaagttgatggtggccaagactgttaaagggaagaggagagagagagacaaagcactgtctcaaagccagggaccttctaggtgaccccagacccttctcaatccaccagcacaataaagtaagcggccctgacaccgtttcccacctccagttagaagtcagccacagtcaggcgcggtggctcacacctgtaaccccaacactttgggaggctaaggcaggtggatcacttgaggccaggagttcgagaccagcctggccagcatggtgaaaccccctctctactaaaatacacaaaaaaattagccagggttggtggtgcatgcctgtaatcccaactacttgggaggctgaggtgggaggatcacttgaacccaagaggcagaagttgcagtgaactgagattgtgccattgcaccctagcctgggtgacagagtgagactgtgtctcacaaaaataaataaataaataagtcagccaggacgccaggagacttatcttgttgtcttggagactccgccacagcagcacagagctgagaggcagtcactcgctgtgcacctgatctcaatcaactgtgacttctacaagccgagcatgcactctgttccttgttcttttgtacgaaccagagcctgatccttccttggcaccccaagcatccggtccaaggtaatgatgtaaacaaagattcctctctgatttcttgataagggctaattctgtattctaccccataacatgttccgtttaaaatttaaaatgctattttcagtggctttctatcagtgaaacatatgctcaagaaaggtgcgctctgtttggctgacacccgggcatgcccacgcccaccccagtggcacagccttatcctggggcccctcacctgcctgctatctgcctaacagtcagttcacaggcacagcctaggcacacaccagagaggctgagccagcctggcaagccaggccaccctgatgctctgctgcaggacgaaagcctctgattgccagtgaaggaacgcaagcgacagctggggctccggggaagtgaaataacttgcctctaggtcacaataattggcctcaggtagcggcagagcgggactgcacacctgggtctccctgacaccataccatagctctgccctgtccctgccctccagcagcccactgggtgggaccctccacccagacccctcccctcaagccagaagccctttgaagacaggaggccagtctgaaactgagcaggctgaactcaaagtccgcaggatgcacagggctaagtgaacacaagcatctctgtcctgtccttcctgatacgtctcacaaatacaagcggagagtggacaggtagacggccatgaggaacagcaacaagaagagacactggcaaatcctggaacactgagaaggacacagggacagtaaatggtctaggagtgcggaaggggtgacagtcggctccagctccagcccaaggcctcaccccactcccagccccaggacctggtcaccatgagatgggaggatgccctgtcctcagccttcatcctcattcccacctgggcccatcccctcctcgggggccatcctgcctgagaaccctgggcccgagctgctgcgggagtgggcgtgtgtggcaggtggaggggagggcgggaagaggaagaaaggcagtgtccacagcacattcctgtccaccgccggcctggcccagaacagctgcggcaagaacccaggacttctccagaaacactcaacagtggcagacacagccccacactccgacaagtgagtgtcccttcttgaaaaagccccacggcccagtcatcccagggggaagaactcctgtcaacagcctctcccacacccggcgctccgagtggcagccgagagcctctttcctaagctgctgggtagcggctgatccagagcatcccctcgcgcaggagatggagtggaacagccagcagaaaaacacgcgggcagcgccggggaaggaacgcgggcagcgccggggaagggaacgcgggcagcgcttttgtaaaaagcaaactaccctcggagagaaataagaaaggtagtatccatttctaaagtatgctatgagaagagaaatacattcaagaaaaacgtgacccaggaaatgacgggaggactggaagataaaagctcaggaagtcacccagaaagaagagctgaaaggcacagagataaagaacagaaaagacgtagacaatctacagaagcacccaatacacaaacacaaggatgaccgaaagacccgaggacgagagggtggagcaccacgaaagacacgcacaacccgcacggcccaccatggtgagcgtaactgggccgctccccggatgcgcagcagcacgagaaggggagggcgggctccctgaggaacttggccgggggcgaggaggaagaagacccaggaaacgctcgggagccggagtcccctgtgccgaagcagcaacagcaggtgccgggaagccacggagcaccaagaaacatcctgtttcctggaactccaggaagcaggattccacgcgggatgcagccaagcagcagaccccccaccatgcaggccagaacaatgagagcgaggcctccacacgagccggatcagacccaggcagaaccggacaggcacaggacctgaggaacaccatcgacaggcatctgcgacatctctggcaaagcatttgtttaaaagagaaagcggcaccaggggagttgaggggaggaaagagaattgaaatgaaaagaaaaacaaacagaataattacactgaaaactaagcacactgcagagccggctggcaccctgagaattcacagatactgtgcagggcatcacccacgtggcaggtgcctgcagtgaaccgttgtcatacacatccgcgaggcccacgctggcgcctatcagggctgaacagccatgctggcaggaaagaacactcatcacctactggaacaagaagtcaataggcagaatttttttttttaacggagttttgctcttgtcacccaggctagagtgcaggggtaccatcggggctcactgcaacctctgcctctcacattcaagcaattctcctgcctcagcctcccaagtagctgggattacaggcacccgccaccacgctcggataatgttttttgttttttgttttttttttgagacggagtcttgctctgtcgtccaggctggagtgcagtggtgcaatctcggctcactgcaaactccgccacccgggttcacggattctcctgcctcagctcccgagtagctgggactacaggtgcccgccaccacacccggctaattttttgtattttcagtagagacagggtttcgccatgttgggcaggctggtctcgatctcctgacctcatgatccgcccgcctcggcctcccacagcgctgggatgacaggcctgagccactgcccggccaataggcagaacttttaaagcaaacgatgcagggctgtatgttcacagtatttggaaataagaaggaaaatatccaaagaaaaagtcaaagagttgaaaatggtcatttctggagaatgtaacgaagagtaggcaacactgtatttctctaccaacattttcgattatttcacttttagaccatttaatttttttaattaaaaaaaaaaaaaagaagttattccgggcagcaggtggcaacaggggcacgcaggtgggtgcctggaggtgggagggccacagggaaaagcagtggcggctcccgggcttccttgcaaggcctgaaaccgggaggccgccaagcgctaaaacgtgctccagcaccaggagtctcccaacacagccacagccctgcggagcccggagcaggccttggaagcagccgtggggagacggcgccaccgcgtggaagccgtggggatcactgctggtcctccccatgccggagacacgaggtctgggtccttgactgactctgcctggggacaaaagccttttcctcgccattcatggaccttcactccctgggtgccagctaggcgctgctgcagggatatagagagatcttccagcagctcggtctgtggaaggaaatgcaaaagaaagaaaagaaagcgtggaatgtgccagagcagacacaagcacgggtgcaggaggccacaggaagggccccgctgcaacgatgggagggcgctatgctcaccaaggccacaaaccacgcctgggcccctgagcacagcctgaaccagccaaagcccaagccccgccaagagtactgctgggtgaaacagatgaatgacataaataaactacctggaaggtgagagggcgaaaagaaagcagggagaaggattgagtgagccccacgaaggaagaagttcaatttcaagtgtggtgctacagaaagcctcgctaacttcggagaacagccatgtagctctctggaagaagagcaaagccccccaggctggggatctggatgttggaggaacagtaaagagggtgaaacggtgtgagcaaagggaaggagcaggaggtgagctcagctaggtcctggaggccaagtggagaggcctttcgaggtcattcccagaacctgcgcttcactctgagtgtgacagagatgcctggcgttcagcaggatagggtaatctggacgacattttcagaggcacacggaggctgatatgctgagaacacattatggagtcaacagtgaaaatgctactgcagcaatgcaggccaggggtgctgctagcaggcaactgcttaggcctgtagggattccaggagcactgggagataaagcaaacaatggcttaggtgccaggcggaatggagaggagctcacagtcactaccaggttcggggcccatgcagctgggaagaacggagctgcgatgttctgaaaacaggaagcccgcacgtgaagcagtcatctgcagagtgcccttggagcccgagtgcccagcagggcaggagaacagccacccagccagccacgcaccacaatctctcacacagaccctccccactcatggaacccaagggtgtctgcagcccagtgccatatgcacgggagaataacaggcaccagagaaactcctacttgggtcgcagtcccacagcgggagcgtgcacagccagcccagggccgccgccagcccccacggcccaacacaagtgcagttacctccctggacaatccccttgctcagcccatccttgttgtctgaagtcaggagcagttccacaatgccacggtcctccagtgcctgtgggggaaatgagacaagccctcgtctgccctggctccttagagcttctgcagtgacacacagctgcagttgggtagcctgaagagctagaaggagagatgacaaataaagcgtttatttctctgccaaaaacagaaaagtctcctgccatctgcaccggccatgctcagcacagctccaatcagcatgaattcccatcacagcaggggcagggctggcaaactagggcagcccctggttgctccggatctggaaggtgcccggtgggccagctagcatgcctaggcgagtctacactgaggccagctcagggaagcctgctgccgcgtgtcacccgccactgtctgctgggctccagcgagtaggtcaggcctccaggacgacacctacatccttcccttctctcacagcacaagcaacaggcctgtcccttccccacgctggccggtgtgggtttgggggatggcaaggcccaggagggcccaccatgccctgtcacgtgcccacggtgcactgcccatgcccagaacagcaggaagcatcctcccagctgtaaagcagagagtgaagtggaagaaacgctgtgcttgaggggcagtgacgacaatcaccactcagagcgtcccctgacatccgcagagcagtcactgccacgccaggccctccgctcatacacagactgtcctacgcgagccttgcagttgctgtcttcacagtagagacgcgcctcggaggcgtgaagtcaagcatcgcaggttacagggcccatggcaacgtgggcctgaacccagagccaaaggctctgtgctgaggtgctaggatcttttggatcaaaaatcccaacagaggtgtcttctcgtaatcttccctgcagatattatgccaagactgtttatttccgctgaaatcttttggaagtggatagacagcgagatcatctgctgggcgaataaggctcgtgtccagtcccacacgcggggaaggaaagagcagagggggctctggtctcaggcacaggagagctgcagagttcaatccatgagcccaggtgggattaatcaagagtcctgtatctaccacctcacactatcattcactgatatttagcaagcatttacttaggtccctaccacatacacacacacttaacatttcctgggcattcatttaccgactccaccccagaggggataattgctcccgcctgagcaccagagatctgcagagctaggctgggagcaggcacctgttctctcacaccactctcccagcagcctcagagagaggctggtgaattctcccaagagcttccggaccacagaggctggacgctgctgcttctctttgcccacctgagtcacacatgggcgcctccgccccgacaccagggaagcatgagtggagcaggacgtccctgagggagctgcactctcctctcgtggggctctccttctctgcagctgagtaactgagtcaacaaccgctgagaggccccagggccaagagacagtctgcgggaatggggtatcgcaggagacgcttcaagtcctgtgctgggatgggatctttctgtaggaagctgaaggagtgccctactccaggccgtggctgggcatggccatcagaatggaccttgcccctttccagcttgaggaatgccacccttcctggacacggccttgcttcctcctaagagggctttctgcaggtgagaagggggaagagtacgcatgaacccacaagttgaagggactgagcctcggtctcccacgtggagggactgaattaatttccagacggaaaatgctctgcacgtcgtagcagaagggatgctgcccaggcatcaaggcccaaagccgtccggccttcaggtaggtggagtcactgcggccacttacacttcctcagctcacaccatggccgaacctccaaggtactccacagcaaatgccaatgattccatcaaggtcttatttattgacgacttactagaacagtactgagctgcgggatatcacatcatactcacaatttggaaaggtaaatactcctattagtcacactttatagaagagagaaaggaggtttagaaaaaactcgaggcatttgttcaaggtctcagctactaagggacagaaagcagatctgaatgtagcctgttattttaagtgtggctctgcccttcgctggtcagtcatgcattgagtcagtggctctcagccttccctacacactgaaaccagatgtctgagaaccccaaggattcttctttgcttggtatggtacatggcctgggcgcagggatttcttaaaactccccagatagagccagtgtgcagcctgggctgggaaccactgctttagactttagaattggagccgcctctccaggaagccttcctaatcatcaccacgcaattaagccaattcctttattcccagcccctgcaataccaggtgtgtactgaaattcccagatgaaactcaatcaagggtaaataagtgacaaccctgttgaaataaaacaacagagaaaattcactaatacatgatgttggaggatgtattaatatgagaaaaatattagacccacatgtcacaccacagcctatagcacactccagaggaaggaatctaaagaaacgcactaagaggattcttaccttcttgacgtagggcatgtatgcggggtctttattataggaaccatattcattctccacctgcacggcaatgataggtcccccacgcttgtactg

SEQ ID NO: 650 - DNA, 1200 bp, Homo sapiens
gacaggcaataacgaatgcatattatttcagatgcaatctgttgtatggaggatgagggtgagtcggggagacagaggtagcagtggagagggtcagtgctctgtagggtgaccacagaggcctccgtgataagtgacccttgagcgaagcagcaacaccctgacatgcagctccccgggcccaagaagaacgaactctccaccaggcggaacaagcgttgctcagcctgcttacagatcagcaggaaggccatcgggctcaactgacggggcgggggctgctgggggcaacagcagtgagggatgtggtgggcgtgggagaagggagtccccaggcaccgggtgaaaccagaaggcaatagggggtccagtacggaggactaacataatctatccatctctaagaagaactgccctgctcctccacggaggataaatggagagggcaagggcaggtggagacgtggctcctggaatcatccaggccaagatgcagtgggctgagtgggggcatggggttggggcagagagaagcagtcaaattttggccaagtttaggaggcagagccaggaggatctgctgctggattggatgtgggagataaagagaggggtccaaaatagcccgagacacagaacagcactgccatttccagatacagggctgcgtgcaggaggggtaatgtggggaaatggagctctgtgtcaggtgcctgttagacacatgcagaagaaaatgcgcccccacacacctggagctcaggtgcagcccagcatcggcgggcgcgggtgtccaacctgtttacaaaccacaggtgcacgggtgagaccctatgcagtgagtgtggacagaggaaagaaacagcccaaggagtgggccagagacccccagcattcagaggctggatatgaagagggattctccaaagagacctagatgaggccataccgtgtggaagataatggaaacatctttagtcaacgctggagaataagctctgccaagaggtactttgatagagaagctgagcaattaactggcagaaaataagggtgagaataagaagctggtgtaggaagacctcaccttaggaaaccacagtgtgtcctgctcaggtctgcgtggaagtgtgatccaaggggcttctccaccttacaggaggatttgcaggaaggttcccttccattccatcactttct

SEQ ID NO: 651 - DNA, 2738 bp, Homo sapiens
ttacaacacctcgcccaagccggcgcgccacgtgcgcgagcagctctcgtccgagacgggcctggacatgcgcgtggtgcaggtcagcgctcgcccctgcttccctcccgcccgcggccttgggggcccccgcagagccgggcggccgctcaccccgccccgcccccaggtttggttccagaaccgccgggccaaggagaagaggctgaagaaggacgccggccggcagcgctgggggcagtatttccgcaacatgaagcgctcccgcggcggctccaagtcggacaaggacagcgttcaggaggggcaggacagcgacgctgaggtctccttccccggtaggcggagggatcgcggagctcggggggggacgagcgcgcgtcggcggggtcgcaggggtcccagggagcccgcggatctgaatttcccatggagttagtggactccttaagttctactttcaaaagcatttcacttacagaacctgctcccccagcaccctccccgccctgggtggccactccggaccactgcttttcccctggtggggacacaatccctgtggcccgacctgtccccaagctgggcgcctacgggctttctcatgggggggtgggcgtgtccaggccgtctctctggctcctagcccttgcagtgatttttaggagaatgggcagtgcatttcgggaaagactgagtcgaagtcccagctgcttggagttgggggagggggctacctggggtcagggagagaaggttccatacccttctgtggggcctggattatttatttcattctccgggcaccggggatgctgcgtccccatctgttgatgcccatcctcagaatgtggacaagacactctcttttgggctgcctcgtgacccgggctactcactcagccactctggaactaaatatccttgtctgcaaaatgtgggtggtggtatctgtgcccccttcctaggctgctgtggggctggtcctgaaagcctgggccctggctgggctgttcctgactctgatcccaccaggcctgagacacctgggctgactcaggggtgagggcagtggaggggcaggggcagccatgctccaacagtagaaggggcctgttatgacctgtcatgtggtgtggggcagccactctttctccgacccaggggtgcctccgcctgcaggatgggactctgaggggccgcaggtggagggcaggcgctgactgagcctctgcttctgttgcagatgagccttccttggcggaaatgggcccggccaatggcctctacgggagcttgggggaacccacccaggccttgggccggccctcgggagccctgggcaacttctccctggagcatggaggcctggcaggcccagagcagtaccgagagctgcgtcccggcagcccctacggtgtccccccatcccccgccgccccgcagagcctccctggcccccagcccctcctctccagcctggtgtacccagacaccagcttgggccttgtgccctcgggagcccccggcgggcccccacccatgagggtgctggcagggaacggacccagttctgacctatccacggggagcagcgggggttaccccgacttccctgccagccccgcctcctggctggatgaggtagaccacgctcagttctgacccaggcccggctccaccctgcacctcacacgagggagctgcccctgggtgggcggctcggggctgctggggtttccgaggaagtggggccagggcgtcaagggagggctggtgccttcggagcctcccactgccgaccgcacagctccctctctgggggctgagggacccacctggcccctcctctgacacagggctggcccgccaggtggcctcccagcaagccagccttttttgtaagcaaatttctcccctttattgaccaattaactgagcacttgctgctatttctagacatgaaatgtcaccttgctgaggcccagcccagcccagcatagcccgagggctggaaaaacgctttcatctctaaaactgagaaatcatcataattgtgctttcacttcccaggctccatgtgtcttggagccgtcaccccgaggctccctctttaggtcggagattggccttgcctgtcgaggcaagaggctgcagaggcggggacacacctgtgtcctccgggagaggccccctcctctccccagaccacagggggcctctctgcctccagccccaccttccccgggagaagctttccccaatccccaggtctctagatcattctgttctcgagtatcctgtggaggaggcaaaaatgcctggcgccccttctctccaagctcaattctctaagcccctcagggtctcctcctcaccccaccccaggcccttggtgtccaggctgcacccacagatgtctgttgccaaacagcctgccctccctgccggagccggctctgccagccccagattgggaagtctccccgctggagaagggtggggctcctctgagcctgccctgcctcctccatcagatcctttgggaagaagtttctgggagatgcccgcagctgtgcgtgccccagacacaaaggctggcctgtgtgtaagtcaaagtcactcccgcaaacctgaatctcgagctacctattggttctgtgaatgttctgtgtcttttatttattctcgggtgatcagctctttccaagacttcaataaatttgtcagttacagtc

SEQ ID NO: 652 - DNA, 106 bp, Homo sapiens
aaatggagttttgctcttgttgcccaggctggagtgcaatggcgtgatctccgctcaccacaacctccgcctcctgggttcaagcgattctcttgcctcagcctcc

SEQ ID NO: 653 - DNA, 1295 bp, Homo sapiens
acccgggcaagaatgagacctaccagtattatggcttctcgcataccgtgggccgcctccgcaggggtgagtggaggggcgggtgcggaggggagccccagtccattctcatcacgaatttgctttgagcagtcctgcttctttccgggactcagtgtccgtgtctacagaatgagagagtgtgcccctgagcttcctctgctgcttgtgaatgcctggggcacctcacctacgtggcttcatcctggccctccctactgttgacataagctggcctggggagggaggacgagctcctcagccatccctgtgtggagaaaaccttcctgtttgtccagtaagccatgagcacgcgagacgcagctggagaggacacaggcactcagggcattcggctccaggcttgaatcctggttcctccattctctcctggggaggcaccttgacctctcttgagccccagtttccacctctgtaaaatgagcatagtcacatccccccttcagaacactgtggagtgcccagtacacagtaggcactcaatatacgcacgctctctctccaccaacccccacccctccctctgatgtgctctcggtgcagatcgctggtcctcggtggtaccccgcgtggtggaactgaacaagaactcgaacccggacgaggtggtggtgcctctggacagcatggggaacccccgctgcgatggccaccagcagggttacccccgcaagtggaggactgatgacgccccgctctagggactgcagcccagccccagcttctctgcccactcatttctagtccagccgcatttcagcagtgccttctggggtgtccccccacaccctgctttggccccagaggcgagggaccagtggaggtgccagggaggccccaggaccctgtggtcccctggctctgcctccccaccctggggtgggggctcccggccacctgtcttgctcctatggagtcacataagccaacgccagagcccctccacctcaggccccagcccctgcctctccattatttatttgctctgctctcaggaagcgacgtgacccctgccccagctggaacctggcagaggccttaggaccccgttccaagtgcactgcccggccaagccccagcctcagcctgcgcctgagctgcatgcgccaccatttttggcagcgtggcagctttgcaaggggctggggccctcggcgtggggccatgccttctgtgtgttctgtagtgtctgggatttgccggtgctcaataaatgtttattcattgacggtgga

SEQ ID NO: 654 - DNA, 540 bp, Homo sapiens
ctgtctcctgctaaagaaataccttctgtctatgcaacttttctttccccctttctatacctctcttataagggcaaagcatttatagcctctgagttctaagaaaccatgggagcacggtgatctgctggtgagataaccgagataacagggcccatggtccaggtgccaacaccgaggacccttgttcctttatgtgcacagaaagaagcattaaagagagttgtctcatttctggttgggcgcagtggctcacacctgcaatcctagcactttgggagtccaaggcgggtggatcacctgaggtcaggagtttgagaccagcctggccaacatggtgaaaccccatcactactaaaaatacaaaaattagctgggcatgttggcgggtgcctgtaatcccagctactcgggaggctgaggcaggagaattgcttgaacctggaaggcagaggctgcagtgagccgagattgcgccgttgcactccagcccgggcaacaagagcaaaactccatctcaaaaaaaaaaaaaaaaaaaaa

SEQ ID NO: 655 - DNA, 540 bp, Homo sapiens; identical to SEQ ID NO: 654

SEQ ID NO: 656 - DNA, 540 bp, Homo sapiens; identical to SEQ ID NO: 654

SEQ ID NO: 657 - DNA, 332 bp, Homo sapiens
aggtcttttcccccaaactccatgattagtgcttctgttcacttattaaaaacactgggccaggcgcagtggctcacgcctgtaatcccagcactttgggagcccgaggcgggcagatcacttgaggtcaggagttcaagaccagcctggccaacatggagaaaccctgtctctactaaaaatacaaaaaattaaccaggtgtggtggtgcatgcctgtaatcccagctgctcgggaggctgaggcaggagaatcgcttgaacccgggagacggaggttgcagtgagccaagattgcaccactgcactccagcctgggcaacaaagtgagac

SEQ ID NO: 658 - DNA, 332 bp, Homo sapiens; identical to SEQ ID NO: 657

SEQ ID NO: 659 - DNA, 332 bp, Homo sapiens; identical to SEQ ID NO: 657

SEQ ID NO: 660 - DNA, 6264 bp, Homo sapiens
aagcagtggtttctcctccttcctcccaggaagggccaggaaaatggccctggtcctggagatcttcaccctgctggcctccatctgctgggtgtcggccaatatcttcggtaagttctgaggccatggagccaggcggtggggagggagctccagtgtcagccaggctctgccctgggccttcgaacaggtgcgatctaatttaatcttcacaaattcccacatgtcagtgatttgctttttttttttcagatgaagaggcagatttagagagccgaactgaattacttgaggtcacagagctagtgattgatggagcagaaatgggaaatgtggttgatcttcctaattcaattctaggtcctcctcaccccaccattttggcaaaattttggcattgaccttgggtttttatccccttagctattccaaagtctgtgtcatccataacaggtattttagaagcagtagaaaaagaaatctacctatgaagtgaaatagccctaagttctgtctttggctcagccacttacccatatgacttcgggcaaagtgccaagcttctgtttttttttttttttttcatttaaaaagtaaacaaataacacacacctcatgatgcggttgtgatttctgggtaggaccctatgtgttacaagagttctcaatggaaaaataagtcatgtacattattaattaattggtatttcaatgtttatctggaacatgttacatctgcagggcatggcttgatagattcaagaagaacttccttacggttctctaacttactccaaatagcctcatgggaattgcggcagggtgggggcgggcggggaacgtgtagtcccagcgttgattttgggatccttcacttgccagttacgtgactttgggcagacgactttcgctgcctgagacttggtgcctcatgagtgacaaggatatattgcctgtcacctcttaggagaatgttgcacattaaatgagctaatgtcatacttgtaaaaaagtgtgcttagctgccaaattttaaaataggctgtcataggtaatgatgatgaccctggaaaagcatctgtgcttatgagagcccgtctctgtcctggcagcccagtccacactcttctctgatgaaccacttttcttttcctagagtaccaggtggatgcccagccccttcgtccctgtgagctgcagagggaaacggcctttctgaagcaagcagactacgtgccccagtgtgcagaggatggcagcttccagtaaggcttatgtcagcagcgaactctcaaggtccaagatgccataaaaagcatcttgtgccttcccccctcttcctgagctctgccctgcaactcctttgtgcatgtgaggcttggccactgtcatttggaggtgcctgcctttcagttccactgtcatttggaggtgcctgcctttcagttccccaagctgttcaacactggacaatctgaccaagtgaaccccaatccatgcttcatcctcccactgccctcccttctcttcttgccatcactttttctgtgatggcttgaataaacggcacgtgtggggagtggggcaggttgaggagagtgtcaaatgatctgtgctttgggacctctccctcctccaagtatcctcttgagaagctggggtggtggaagcagaggctgccttgacttcctagtccttagctgccaccgaccctgcccggactagctctctaggctgcctctgggcttctgggtcgctgtctccacattgagctgctctctgaaaggggtttctccagctgccctaatgcagacttggggcctgagaccctctctgtggagagtgtggtaataatctagacaattcttccctgcagaatagacaggaatcctttgcaatgtgcatgcattgaaatttccttgtgctattccagtcatgttgaatcaggggaactccatttatataactgcgttctgggaaatgtctgtgaaacctccctccctgctgctatcttatgtacactcttaatgtgcctaaccttccacgagtgtgcagagatgctgctagagcagtccctgcttagatcactgggaattctggaacagcaaggaaggagttaaggaggaagtctcactttcaccagccttatttatattcccattcccaactctcttgttctggcctcttgcagtttcaaacctggcctctcttcaggaggctttgcatatgctgttccctttacctggaatatcttttaccttcttatacctctgaccatcctgcaggtctcagttcagtcatcatttctggggagtcaactctatggcctggcctgaccccacccatgtgcttcccaatataccctgctggcccctgatcccactaacatcccacccccaagcccccactccctatccatacaatgtgggcactgcctttaccctctgcagcctcataatgcctgaggacacttggtggatgtggctgaagccctgcactccagggtgggtcacttgttttggggctggcaggctggacaggtggtgaatgaatggctggggcaggaggcagagcaggtgctagccaggcaggaaaagtggggcctttcctttcccaggtcagccacccttctccactccactctctccctaatttaaacgaaccaaaacttgcaagaatggaaatgaagaagaaaagtagcctgagtgggagccggcatgtggctttgggggcccatcccagggtcacctggtctgtgtctcctcctcaggactgtccagtgccagaacgacggccgctcctgctggtgtgtgggtgccaacggcagtgaagtgctgggcagcaggcagccaggacggcctgtggcttgtaagtgggagtgggggacgtcccttggagggaccctgctaggacaactcacttccaggaatgagcactgggtttgggtgggtgactgagcaggtcctccctctgggctgctggcttctcctctgtgaataagaatcatccctgcaagccatggaaggccctatttcctgcagggccactgtgaaagtccagtcatttgttcaataaatatctacccagttcctcccatgagccacatgctgagaagacaatggtgaacagacatcaacatctcctgaaatcagaaagtgaccagaaaaatatgagtgccttctcacccgtggtgtgaggagtttctaaaatttaagacttgggtcaaagctatccagttaagataattattatagtgagtaatcaaagaaacacagtccctatttaaagcatgtcataactctaaaacaatggttaacttaagccaaccacctcaaaatgaggaaattgagcctaaaaccaaaactatcctttgacggattaaaagctctgtttggggtactggttttatgcatctagtatggttgtcatgggggcacgctggccccatactctcctgctgtgtgagcttggctgagtcaggcatcctcactgagctatgggtcctcatctgtaacatgaatatagcatctgccttgtatgatgtgaggatttagaacacgtgtaaacactaggcacatagtaggtattcaataggggcgatcattgctaatgtctcagtccatttgtgttgttataaagaaatgcctgcggctagataatttataaagaaaagagatgtgtttggctcacagctctgcaggctgtgccgaagcatgccactagcttctgctgctgctgaggacctcaggctgcttccactcgtggtacaaggggaagaggaaccatctgtgcagagatcatgtgagagagaaagctagagagatagaaggtggaggtgccaggctctttttaacattcagctcttatggacactaatagagctggaactcactcactctgagggaaggcattcatctcttcataagggatccacttccaggactcaaacacctcccacattggggatcagatttcaacatgagatttggaggggacaaatgctgaaactgtggcagttaatgtcactagcctacaagcagagtggtgaagcagcttccccaggatcacacagagagcccgtggagaaaactggactcagaaaagctctgttaatgccaggcctgcactctgatcccatctcccctccacaggaccgtgctctggggtacctgactgatgtggcaccagcgagatcagcccttctctgactcagtccacaggatactagctaggcctgttctgtggctgccaccccatcactgcgtgtccttgggcgggtcattcccctctcagctgtgtccccttgggaagggagcatgagttttcctgggctctgccccctggaaatttccctgcagttctatctaacattgctccttgtacccacaggtctgtcattttgtcagctacagaaacagcagatcttactgagtggctacattaacagcacagacacctcctacctccctcagtgtcaggattcaggggactacgcgcctgttcagtgtgatgtgcagcaggtccagtgctggtgtgtggacgcagaggggatggaggtgtatgggacccgccagctggggaggccaaagcgatgtgagtttcactgagcgcctgcacccctagagctggggaggggctgaagctttcctcactgcgatccaacacatttagggtttcctgccgaagtgggcagagaaccaggccctcattagggaaaatgaaagcttcaaagggaaggttttattattctcatatttccatatggtagacaagccatattcactggctgatcattagaaacataaacaggatttcactgaacgttgtgagtctcctgttgcagacctgagtcactgcatgggtctctaactgtcacgtgtatagtataagcacagccatgtgctgcatacggatgttttggtcaccagtggaccacatacatgatgatggtcccataagattataataaagctgaaaaattcctatttcctagtgatgtaatgatgatcttgaccccgagcaggcctaggctaatgtgtgtgtgtatctcttagtttttaacaaaaaagtttaaaagtaaaacaaaaattaaaaataaggaaaagtttatagaagaaggatataaagaaataaaatatttttgtacagctgtaccatgtgttcctgttttaagctaagtgttatcataaaagagtcaaaagttttaaaaaattaaaaaatgtataaagtaaaaatattggccgggcgcggtggctcacgcctgtaatcccagcactttgggaggccgaggcgggcggatcacgaggtcaggagatcgagaccatcctggctaacacggtgaaaccccgtctctactaaaaatacaaaaaattagccgggcgtggtggcgggcacctgtagtcccagctactcgggaggctgaggcaggagaatggcgtgaacccgggaggtggagcttgcagtgagccaagatcgcgccactgcactccagcctgggcggcagagcaagactccgtctcaaaaaaaaaaaaaaaaaaaaaaatgttgcagtaagctaaggttaacttattactgaagagagagaaaaaaattataaacttagtgtagcctcagtgcatagtgttgataaagtctacaacagtgcacatgaatgtccttggctttcacactcactcactgactcacccggagcaactgccagtcctgcaagctccgttcatggtaagtaccccatacaggtgtactattctttatcttttatactgtatttttactgtaccgtttctatgcttaggtatgtctagatacacaaatactcaccattgtcttacaattgcctacagtactcattacaataacatgctgtataggtttgtagcctgggagcactaggctagaccatatagcccaggtgtgctgtaggcaaaccatctaggtctgcataagtacactctatgatgttcacacgacaatgaaaccgccgaacgatgcatttctcagagctcatccccattgctaagggacacgagtgcatatgctgctcgactgcagaaatatgtgtctactcatatataaggatttttttttcgtgaaaatgtttaggtccaaggagctgtgaaataagaaatcgtcgtcttctccacggggtgggagataagtcaccaccccagtgttctgcggagggagagtttatgcctgtccagtgcaaatttgtcaacaccacagacatgatgatttttgatctggtccacagctacaacaggt

SEQ ID NO: 661 - DNA, 6268 bp, Homo sapiens
aagcagtggtttctcctccttcctcccaggaagggccaggaaaatggccctggtcctggagatcttcaccctgctggcctccatctgctgggtgtcggccaatatcttcggtaagttctgaggccatggagccaggcggtggggagggagctccagtgtcagccaggctctgccctgggccttcgaacaggtgcgatctaatttaatcttcacaaattcccacatgtcagtgatttgctttttttttttcagatgaagaggcagatttagagagccgaactgaattacttgaggtcacagagctagtgattgatggagcagaaatgggaaatgtggttgatcttcctaattcaattctaggtcctcctcaccccaccattttggcaaacttttggcattgaccttgggtttttatccccttagctattccaaagtctgtgtcatccataacaggtattttagaagcagtagaaaaagaaatctacctatgaagtgaaatagccctaagttctgtctttggctcagccacttacccatatgacttcgggcaaagtgccaagcttctgttttttttttttttttttcatttaaaaagtaaacaaataacacacacctcatgatgcggttgtgatttctgggtaggaccctatgtgttacaagagttctcaatggaaaaataagtcatgtacattattaattaattggtatttcaatgtttatctggaacatgttacatctgcagggcatggcttgatagattcaagaagaacttccttacggttctctaacttactccaaatagcctcatgggaattgcggcagggtgggggcgggcggggaacgtgtagtcccagcgttgattttgggatccttcacttgccagttacgtgactttgggcagacgactttcgctgcctgagacttggtgcctcatgagtgacaaggatatattgcctgtcacctcttaggagaatgttgcacattaaatgagctaatgtcatacttgtaagaaagtgtgcttagctgccaaattttaaaataggctgtcataggtaatgatgatgaccctggaaaagcatctgtgcttatgagagcccgtctctgtcctggcagcccagtccacactcttctctgatgaaccacttttcttttcctagagtaccaggtggatgcccagccccttcgtccctgtgagctgcagagggaaacggcctttctgaagcaagcagactacgtgccccagtgtgcagaggatggcagcttccagtaaggcttatgtcagcagcgaactctcaaggtccaagatgccataaaaagcatcttgtgccttcccccctcttcctgagctctgccctgcaactcctttgtgcatgtgaggcttggccactgtcatttggaggtgcctgcctttcagttccactgtcatttggaggtgcctgcctttcagttccccaagctgttcaacactggacaatctgaccaagtgaaccccaatccatgcttcatcctcccactgccctcccttctcttcttgccatcactttttctgtgatggcttgaataaacggcacgtgtggggagtggggcaggttgaggagagtgtcaaatgatctgtgctttgggacctctccctcctccaagtatcctcttgagaagctggggtggtggaagcagaggctgccttgacttcctagtccttagctgccaccgaccctgcccggactagctctctaggctgcctctgggcttctgggtcgctgtctccacattgagctgctctctgaaaggggtttctccagctgccctaatgcagacttggggcctgagaccctctctgtggagagtgtggtaataatctagacaattcttccctgcagaatagacaggaatcctttgcaatgtgcatgcattgaaatttccttgtgctattccagtcatgttgaatcaggggaactccatttatataactgcgttctgggaaatgtctgtgaaacctccctccctgctgctatcttatgtacactcttaatgtgcctaacctcccacgagtgtgcagagatgctgctagagcagtccctgcttagatcactgggaattctggaacagcaaggaaggagttaaggaggaagtctcactttcaccagccttatttatattcccattcccaactctcttgttctggcctcttgcagtttcaaacctggcctctcttcaggaggctttgcatatgctgttccctttacctggaatatcttttaccttcttatacctctgaccatcctgcaggtctcagttcagtcatcatttctggggagtcaactctatggcctggcctgaccccacccatgtgcttcccaatataccctgctggcccctgatcccactaacatcccacccccaagcccccactccctatccatacaatgtgggcactgcctttaccctctgcagcctcataatgcctgaggacacttggtggatgtggctgaagccctgcactccagggtgggtcacttgttttggggctggcaggctggacaggtggtgaatgaatggctggggcaggaggcagagcaggtgctagccaggcaggaaaagtggggcctttcctttcccaggtcagccacccttctccactccactctctccctaatttaaacgaaccaaaacttgcaagaatggaaatgaagaagaaaagtagcctgagtgggagccggcatgtggctttgggggcccatcccagggtcacctggtctgtgtctcctcctcaggactgtccagtgccagaacgacggccgctcctgctggtgtgtgggtgccaacggcagtgaagtgctgggcagcaggcagccaggacggcctgtggcttgtaagtgggagtgggggacgtcccttggagggaccctgctaggacaactcacttccaggaatgagcactgggtttgggtgggtgactgagcaggtcctccctctgggctgctggcttctcctctgtgaataagaatcatccctgcaagccatggaaggccctatttcctgcagggccactgtgaaagtccagtcatttgttcaataaatatctacccagttcctcccatgagccacatgctgagaagacaatggtgaacagacatcaacatctcctgaaatcagaaagtgaccagaaaaatatgagtgccttctcacccgtggtgtgaggagtttctaaaatttaagacttgggtcaaagctatccagttaagataattattatagtgagtaatcaaagaaacacagtccctatttaaagcatgtcataactctaaaacaatggttaacttaagccaaccacctcaaaatgaggaaattgagcctaaaaccaaaactatcctttgacggattaaaagctctgtttggggtactggttttatgcatctagtatggttgtcatgggggcacgctggccccatactctcctgctgtgtgagcttggctgagtcaggcatcctcactgagctatgggtcctcatctgtaacatgaatatagcatctgccttgtatgatgtgaggatttagaacacgtgtaaacactaggcacatagtaggtattcaataggggtgatcattgctaatgtctcagtccatttgtgttgttataaagaaatgcctgcggctagataatttataaagaaaagagatgtgtttggctcacagctctgcaggctgtgccgaagcatgccactagcttctgctgctgctgaggacctcaggctgcttccactcatggtacaaggggaagaggaaccatctgtgcagagatcatgtgagagagaaagctagagagatagaaggtggaggtgccaggctctttttaacattcagctcttatggacactaatagagctggaactcactcactccgagggaaggcattcatctcttcataagggatccacttccaggactcaaacacctcccacattggggatcagatttcaacatgagatttggaggggacaaatgctgaaactgtagcagttaatgtcactagcctacaagcagagtggtgaagcagcttccccaggatcacacagagagcccgtggagaaaactggactcagaaaagctctgttaatgccaggcctgcactctgatcccatctcccctccacaggaccgtgctctggggtacctgactgatgtggcaccagcgagatcagcccttctctgactcagtccacaggatactagctaggcctgttctgtggctgccaccccatcactgcgtgtccttgggcgggtcattcccctctcagctgtgtccccttgggaagggagcatgagttttcctgggctctgccccctggaaatttccctgcagttctatctaacattgctccttgtacccacaggtctgtcattttgtcagctacagaaacagcagatcttactgagtggctacattaacagcacagacacctcctacctccctcagtgtcaggattcaggggactacgcgcctgttcagtgtgatgtgcagcaggtccagtgctggtgtgtggacgcagaggggatggaggtgtatgggacccgccagctggggaggccaaagcgatgtgagtttcactgagcgcctgcacccctagagctggggaggggctgaagctttcctcactgcgatccaacacatttagggtttcctgccgaagtgggcagagaaccaggccctcattagggaaaatgaaagcttcaaagggaaggttttattattctcatatttccatatggtagacaagccatattcactggctgatcattagaaacataaacaggatttcattgaacgttgtgagtctcctgttgcagacctgagtcactgcatgggtctctaactgtcacgtgtatagtataagcacagccatgtgctgcatacggatgttttggtcaccagtggaccacatacatgatgatggtcccataagattataataaagctgaaaaattcctatttcctagtgatgtaatgatgatcttgaccccgagcaggcctaggctaatgtgtgtgtgtatctcttagtttttaacaaaaaagtttaaaagtaaaacaaaaattaaaaataaggaaaagtttatagaagaaggatataaagaaataaaatatttttgtacagctgtaccatgtgttcctgttttaagctaagtgttatcataaaagagtcaaaagttttaaaaaattaaaaaatgtataaagtaaaaatattggccgggcgcggtggctcacgcctgtaatcccagcactttgggaggccgaggcgggcggatcacgaggtcaggagatcgagaccatcctggctaacacggtgaaaccccgtctctactaaaaatacaaaaaattagccgggcgtggtggcgggcacctgtagtcccagctactcgggaggctgaggcaggagaatggcgtgaaccccgggaggtggagcttgcagtgagccaagatcgcgccactgcactccagcctgggcggcagagcaagactccgtctcaaaaaaaaaaaaaaaaaaaaaaaaatgttgcagtaagctaaggttaacttattactgaagagagagaaaaaaattataaacttagtgtagcctcagtgcatagtgttgataaagtctacaacagtgcacatgaatgtccttggctttcacactcactcactgactcacccggagcaactgccagtcctgcaagctccgttcatggtaagtaccccatacaggtgtactattctttatcttttatactgtatttttactgtaccgtttctatgcttaggtatgtctagatacacaaatactcaccattgtcttacaattgcctacagtactcattacaataacatgctgtataggtttgtagcctgggagcactaggctagaccatatagcccaggtgtgctgtaggcaaaccatctaggtctgcataagtacactctatgatgttcacacgacaatgaaaccgccgaacgatgcatttctcagagctcatccccattgctaagggacacgagtgcatatgctgctcgactgcagaaatatgtgtctactcatatataaggatttttttttcgtgaaaatgtttaggtccaaggagctgtgaaataagaaatcgtcgtcttctccacggggtgggagataagtcaccaccccagtgttctgcggagggagagtttatgcctgtccagtgcaaatttgtcaacaccacagacatgatgatttttgatctggtccacagctacaacaggt

SEQ ID NO: 662 - DNA, 6266 bp, Homo sapiens
aagcagtggtttctcctccttcctcccaggaagggccaggaaaatggccctggtcctggagatcttcaccctgctggcctccatctgctgggtgtcggccaatatcttcggtaagttctgaggccatggagccaggcggtggggagggagctccagtgtcagccaggctctgccctgggccttcgaacaggtgcgatctaatttaatcttcacaaattcccacatgtcagtgatttgctttttttttttcagatgaagaggcagatttagagagccgaactgaattacttgaggtcacagagctagtgattgatggagcagaaatgggaaatgtggttgatcttcctaattcaattctaggtcctcctcaccccaccattttggcaaacttttggcattgaccttgggtttttatccccttagctattccaaagtctgtgtcatccataacaggtattttagaagcagtagaaaaagaaatctacctatgaagtgaaatagccctaagttctgtctttggctcagccacttacccatatgacttcgggcaaagtgccaagcttctgttttttttttttttttttcatttaaaaagtaaacaaataacacacacctcatgatgcggttgtgatttctgggtaggaccctatgtgttacaagagttctcaatggaaaaataagtcatgtacattattaattaattggtatttcaatgtttatctggaacatgttacatctgcagggcatggcttgatagattcaagaagaacttccttacggttctctaacttactccaaatagcctcatgggaattgcggcagggtgggggcgggcggggaacgtgtagtcccagcgttgattttgggatccttcacttgccagttacgtgactttgggcagacgactttcgctgcctgagacttggtgcctcatgagtgacaaggatatattgcctgtcacctcttaggagaatgttgcacattaaatgagctaatgtcatacttgtaagaaagtgtgcttagctgccaaattttaaaataggctgtcataggtaatgatgatgaccctggaaaagcatctgtgcttatgagagcccgtctctgtcctggcagcccagtccacactcttctttgatgaaccacttttcttttcctagagtaccaggtggatgcccagccccttcgtccctgtgagctgcagagggaaacggcctttctgaagcaagcagactacgtgccccagtgtgcagaggatggcagcttccagtaaggcttatgtcagcagcgaactctcaaggtccaagatgccataaaaagcatcttgtgccttcccccctcttcctgagctctgccctgcaactcctttgtgcatgtgaggcttggccactgtcatttggaggtgcctgcctttcagttccactgtcatttggaggtgcctgcctttcagttccccaagctgttcaacactggacaatctgaccaagtgaaccccaatccatgcttcatcctcccactgccctcccttctcttcttgccatcactttttctgtgatggcttgaataaacggcacgtgtggggagtggggcaggttgaggagagtgtcaaatgatctgtgctttgggacctctccctcctccaagtatcctcttgagaagctggggtggtggaagcagaggctgccttgacttcctagtccttagctgccaccgaccctgcccggactagctctctaggctgcctctgggcttctgggtcgctgtctccacattgagctgctctctgaaaggggtttctccagctgccctaatgcagacttggggcctgagaccctctctgtggagagtgtggtaataatctagacaattcttccctgcagaatagacaggaatcctttgcaatgtgcatgcattgaaatttccttgtgctattccagtcatgttgaatcaggggaactccatttatataactgcgttctgggaaatgtctgtgaaacctccctccctgctgctatcttatgtacactcttaatgtgcctaacctcccacgagtgtgcagagatgctgctagagcagtccctgcttagatcactgggaattctggaacagcaaggaaggagttaaggaggaagtctcactttcaccagccttatttatattcccattcccaactctcttgttctggcctcttgcagtttcaaacctggcctctcttcaggaggctttgcatatgctgttccctttacctggaatatcttttaccttcttatacctctgaccatcctgcaggtctcagttcagtcatcatttctggggagtcaactctatggcctggcctgaccccacccatgtgcttcccaatataccctgctggcccctgatcccactaacatcccacccccaagcccccactccctatccatacaatgtgggcactgcctttaccctctgcagcctcataatgcctgaggacacttggtggatgtggctgaagccctgcactccagggtgggtcacttgttttggggctggcaggctggacaggtggtgaatgaatggctggggcaggaggcagagcaggtgctagccaggcaggaaaagtggggcctttcctttcccaggtcagccacccttctccactccactctctccctaatttaaacgaaccaaaacttgcaagaatggaaatgaagaagaaaagtagcctgagtgggagccggcatgtggctttgggggcccatcccagggtcacctggtctgtgtctcctcctcaggactgtccagtgccagaacgacggccgctcctgctggtgtgtgggtgccaacggcagtgaagtgctgggcagcaggcagccaggacggcctgtggcttgtaagtgggagtgggggacgtcccttggagggaccctgctaggacaactcacttccaggaatgagcactgggtttgggtgggtgactgagcaggtcctccctctgggctgctggcttctcctctgtgaataagaatcatccctgcaagccatggaaggccctatttcctgcagggccactgtgaaagtccagtcatttgttcaataaatatctacccagttcctcccatgagccacatgctgagaagacaatggtgaacagacatcaacatctcctgaaatcagaaagtgaccagaaaaatatgagtgccttctcacccgtggtgtgaggagtttctaaaatttaagacttgggtcaaagctatccagttaagataattattatagtgagtaatcaaagaaacacagtccctatttaaagcatgtcataactctaaaacaatggttaacttaagccaaccacctcaaaatgaggaaattgagcctaaaaccaaaactatcctttgacggattaaaagctctgtttggggtactggttttatgcatctagtatggttgtcatgggggcacgctggccccatactctcctgctgtgtgagcttggctgagtcaggcatcctcactgagctatgggtcctcatctgtaacatgaatatagcatctgccttgtatgatgtgaggatttagaacacgtgtaaacactaggcacatagtaggtattcaataggggtgatcattgctaatgtctcagtccatttgtgttgttataaagaaatgcctgcggctagataatttataaagaaaagagatgtgtttggctcacagctctgcaggctgtgccgaagcatgccactagcttctgctgctgctgaggacctcaggctgcttccactcgtggtacaaggggaagaggaaccatctgtgcagagatcatgtgagagagaaagctagagagatagaaggtggaggtgccaggctctttttaacattcagctcttatggacactaatagagctggaactcactcactccgagggaaggcattcatctcttcataagggatccacttccaggactcaaacacctcccacattggggatcagatttcaacatgagatttggaggggacaaatgctgaaactgtagcagttaatgtcactagcctacaagcagagtggtgaagcagcttccccaggatcacacagagagcccgtggagaaaactggactcagaaaagctctgttaatgccaggcctgcactctgatcccatctcccctccacaggaccgtgctctggggtacctgactgatgtggcaccagcgagatcagcccttctctgactcagtccacaggatactagctaggcctgttctgtggctgccaccccatcactgcgtgtccttgggcgggtcattcccctctcagctgtgtccccttgggaagggagcatgagttttcctgggctctgccccctggaaatttccctgcagttctatctaacattgctccttgtacccacaggtctgtcattttgtcagctacagaaacagcagatcttactgagtggctacattaacagcacagacacctcctacctccctcagtgtcaggattcaggggactacgcgcctgttcagtgtgatgtgcagcaggtccagtgctggtgtgtggacgcagaggggatggaggtgtatgggacccgccagctggggaggccaaagcgatgtgagtttcactgagcgcctgcacccctagagctggggaggggctgaagctttcctcactgcgatccaacacatttagggtttcctgccgaagtgggcagagaaccaggccctcattagggaaaatgaaagcttcaaagggaaggttttattattctcatatttccatatggtagacaagccatattcactggctgatcattagaaacataaacaggatttcattgaacgttgtgagtctcctgttgcagacctgagtcactgcatgggtctctaactgtcacgtgtatagtataagcacagccatgtgctgcatacggatgttttggtcaccagtggaccacatacatgatgatggtcccataagattataataaagctgaaaaattcctatttcctagtgatgtaatgatgatcttgaccccgagcaggcctaggctaatgtgtgtgtgtatctcttagtttttaacaaaaaagtttaaaagtaaaacaaaaattaaaaataaggaaaagtttatagaagaaggatataaagaaataaaatatttttgtacagctgtaccatgtgttcctgttttaagctaagtgttatcataaaagagtcaaaagttttaaaaaattaaaaaatgtataaagtaaaaatattggccgggcgcggtggctcacgcctgtaatcccagcactttgggaggccgaggcgggcggatcacgaggtcaggagatcgagaccatcccggctaacacggtgaaaccccgtctctactaaaaatacaaaaaattagccgggcgtggtggcgggcacctgtagtcccagctactcgggaggctgaggcaggagaatggcgtgaacccgggaggtggagcttgcagtgagccaagatcgcgccactgcactccagcctgggcggcagagcaagactccgtctcaaaaaaaaaaaaaaaaaaaaaaaatgttgcagtaagctaaggttaacttattactgaagagagagaaaaaaattataaacttagtgtagcctcagtgcatagtgttgataaagtctacaacagtgcacatgaatgtccttggctttcacactcactcactgactcacccggagcaactgccagtcctgcaagctccgttcatggtaagtaccccatacaggtgtactattctttatcttttatactgtatttttactgtaccgtttctatgcttaggtatgtctagatacacaaatactcaccattgtcttacaattgcctacagtactcattacaataacatgctgtataggtttgtagcctgggagcactaggctagaccatatagcccaggtgtgctgtaggcaaaccatctaggtctgcataagtacactctatgatgttcacacgacaatgaaaccgccgaacgatgcatttctcagagctcatccccattgctaagggacacgagtgcatatgctgctcgactgcagaaatatgtgtctactcatatataaggatttttttttcgtgaaaatgtttaggtccaaggagctgtgaaataagaaatcgtcgtcttctccacggggtgggagataagtcaccaccccagtgttctgcggagggagagtttatgcctgtccagtgcaaatttgtcaacaccacagacatgatgatttttgatctggtccacagctacaacaggt

SEQ ID NO: 663 - DNA, 7569 bp, Homo sapiens
actgacttccggctacgccgttgtctgggtggcgcggtcgagtcatcgcagggcctcaccgcttcgttctcccgtccctccccgcgccttggcgcggggggtcgactagccaagtgaggcgggaggcgactcggacctttccctgcatttcgtttcggccagtgccgggggctacccgccctggggcctgggatccttggggcccgtgaggcccactcttagcggccggggcctaccgcggcccgccgctggccctcatgaggcatagcctgaccaagctgctggcagcctcgggcagcaactccccaacccgcagtgagagcccggagccggctgcaacttgttcgctgccctctgacctgacccgggctgcagcgggggaggaggagacggcggcggccggatctcccggccgcaagcagcagtttggcgacgaaggagagttggaagccgggagggggagccgcggcggcgtggccgtgcgcgcgccctcccccgaggagatggaggaggaggcgatcgccagcctcccgggggaagagacggaggatatggactttctgtctgggctggaactggcggatctcctggaccccaggcaaccggactggcacctggaccccgggcttagctcgccggggcctctctcctcgtctggcggaggctcggatagcggcggcctgtggagaggggacgatgacgatgaggccgcggctgctgaaatgcagcgcttctctgacctgctgcaaaggctgttaaacggtatcggaggctgcagcagcagcagtgacagtggcagcgccgaaaagaggcggagaaagtccccaggaggaggcggcggtggcggcagcggtaacgacaacaaccaggcggcgacaaagagtccccggaaggcggcggcggccgctgcccgccttaatcgactgaagaagaaggagtacgtgatggggctggagagtcgagtccggggtctggcagccgagaaccaggagctgcgggccgagaatcgggagctgggcaaacgcgtacaggcactgcaggaggagagtcgctacctacgggcagtcttagccaacgagactggactggctcgcttgctgagccggctgagcggcgtgggactgcggctgaccacctcgctcttcagagactcgcccgccggtgaccacgactacgctctgccggtgggaaagcagaagcaggacctgctggaagaggacgactcggcgggaggagtctgtctccatgtggacaaggataaggtgtcggtggagttctgctcggcgtgcgcccggaaggcgtcgtcttctcttaaaatgtagggtcaagtaatctgctctttatccgcgtttacccctttcaactcccttacaccatgtcaaacttaccttagtgggacatcttcaccggacacatttcagaggagagaaaaaaagtaatattgaatcttaaagtgtttagctaaaagcatgaatgtgacacagtaaccaactcctaatgataacatgtgactattaaatctctctgacagtttcttttttaggtgatttccttcctgccaggctccgttgtaggggttacagaacagtcgttcccgcctcacaacctggtaaggatccatctcttcccgtaacgctcatgctatgctgctttgtctactttaatgggcaacatatcagtttgtgtgtgtgagatttttttttttttttctgttttggtaggtgggagggaaatctaatttgggccctgtccaccctggaaacagacttgtgctggtcaagaatgtatttaagatgcctcttctggttgaaatagctattaatgtgtccccttattcagacttgcgtgtacctagctcttctgtccccagtgtggacatggccttggatgacatcggttccaactgtacactgaaacctgcttatagagagacagtttggagacagtgaaacaggtgaagttgaatggaagttccgagttgtacaaggtgcaaattggaattccgattttagggcaacttttcagaggttgacagttaagtatttggggcatgcacaaatgtgatagttattttgctggaggtgacaggtatctcttaaatatcaacaatgccttttagttttcagtatgagatatagaaacagtctataatggagtaacattttaatgtctcaccattagagaagttggaaattaacatacatatgagactcctgcgttttagttaattggagaataagaatggctaatgtttctttgaggaccagcagtgattaccctatcactgagattgaataaattgttgaacatctttatttttgttgtattaaaattttaggttaaatttatatatgtatgattagatattgaaggttgtgaaatgtgaatgaaaacgtgtaaagtgaggcttcacaaagaatcttattctctgtgtttcaaaagtatttgtcctattttaaaataattttttaaattgagtggttctggccacttaaatgacacgattggtactattttcctaaggtgggatttattcccttgaatctattaaccagttgtataaattgaattatggtgtccttcagtgtaagaggcattaagaaattctttgtgaaacatcactgcttgataaagtatatacgtatttagcatccttgtttttctttgtgctaaagtggatacagctgttggggcagaagagacgggaccagctgctggccacatttcctgctttattttaaaaggtagtataagaaatgaggaaaaagaggtaatatcagggcttctgctgttttttatttttaacatgttcataattaaaaagtattttccagcagtccaaagatgtaagttatcttacacataaaatgttttattttgttatttggttatgaaaatggaatccttgttcttgcacaactgtaaatgttttgttgctagataatacgatttgagacctgaattggtctttggtttccagtgcatcacagcatattttgtaaaatcatctactactgcacttgagcatgaatgggtagtagccaaactcacaaattggagtgatgaacctgcttatacctaagggcaggagcaagcccctcacaatgcagctgcatgggtttttagtgcctactgaattatatatatatatacatatatatatatatatataaaccaaaagtagttggaaagattatttgaaatgactaatttgtgctatctttatgaaatatgttaaatgtagcttttttgaaacagaagccttgaattgaaatttaactaatacttgaacattttgtatatatttctttgtatataattttgtgcagtaccaatgacaaaaatatggtgtcataataaaaccaggtttgttgatcttttagttatgggctcaaagaatttattcatctctaacatgatattggaaaataatggatgaaaataggaaaaatgattgttaatgctgactgtgggtcttaaaaggttctggaaagcagtaagttcatttttctaaaaactataacattctgttggagtattttcttccttacgtcaatacttttcctgcattatttgaaattgtgggctggggagaaacagtagtcaaagctttctgaattgagatactttgaaattccaagtgtagatttttagaatgtcattttataaatggcagtttttggaattacttgataagaacttttgaaaatggaaggattagtatggcctatttttaaagctgctttgttaggttccttatgttttattaactgtcttttctcagtttccatttcatttttttttttctagttttggtgacttagtgattttgtcattttttacatcaacttcatggtcttgtttttacatggtaattgcatgtacttaggatctatctaataggggctttaaataaatttggtcatatttatgtgtaagcacattttactgtaaatgtttgggtttctgaatttaaacagatctgtttatttcagtatgtagtaaacaatatcttaaagtgtccgattcactacttgttaattaaaaaagttatgattaatgtgaaactgttgtcttactatttttagaaaattgtgttctggatgattagcacatggataaaggagatttctggaatataaaatggattgtttttgaaatttctaggtttggctctatttactgtaatggttgaaaacaatttagtatttgggtgacccttttgtttttcttctaaatgtgcctctggtaaaatacagaactagactaaagatgtagctttttaatatttgtcttttgatggtggcaggagttcatacattaattgaactaacacatcatattttgacctactatttctatcatattgacttactgtttctgcacttctttgaccagacttatcttaaaaagtccacttttgttaaaatgtagtcacacctctgatataatccaacaagaagtgttcaaaatattttaaatatttgtgcattttataatcactaaattaatctctctctcttctctttgaacagcttagcagtgtctgcaaaaacgaatcttttcctacaacctgttaactgactggactgttggtaacaaagtaattgtgagaaccatgtcggtcaaaaatttggcatctgctgaaaaaaatgaatgccattttcaagttcccaaattacttctatactgatttcactttccagaaatggagatatgaaaagattctctggaatccttgaaagacttaatagagatacatgagactaagttaatcttggaacaaaattatactttttttgtctttcatgggagtgatactcagttattgcatatctttacaaaattgtaacctttggagaattacagtatttcatcaagaaattagagtttttacataatcaagagcatattctatggaattaacatttagtggactagaattacataagcaggccatcagtgatcacaaggcatatgagtttgtatttatttcctggaacatgagagctaatttggagtacagacagacaccctgctgagtagaatataaaagttaatgtaaagttctgaactataaagagtagtccttttaaatagatgcattgatttgtatatctttgaaaaagttgattatgattaaatgtgtgggtagttaattacaatttagggtaacaaccaggatgtatggattcttgaggttttggcttcttgagctttctcttgagtacttgatactgttttctgaatattttgaggtttctaattaatggtatgctagtttctactgttttatataaaaatttatctagtgttgtataaggactttagtattgtggatgatgggagtggctttttgtggcatatggttgttttaattgaaatattttttcagtttattacaagtgtgaaaaaacactcaaaactctggattgttttatttcatttttgttggattatgttaatacattccttcacgtggtttagattgagtcattttatctcacttacttggaaatgtgcagctgatagaagagggattgggtaggagattggcttttacttcataataaatatacagttggttattgtattattcaaaacttattaaatccattcagtttcttaccattttaagtgtattcagtgcctgtgaagccaggcagcagagtattcccactggcttaaaacttaggcgctgatgctcctacagtacagctagttataattccagaaccaaaggcaccaacattatttggtgaccttaactactactttgatagaacagactgggtaattcactgataatgagtcattacctttttaatatgtgattatctagttcagcattttgaatgtgtagtttaaggtctgatttagtaaaattttaaagctaaataatctgatgactcttgaaagtttaattggtagtatgacatttatgtttttttcccccagactcacagccaatacaaagttttgagactcctaaatgttaatatttttgctgtttttctgagctgtttttttatttacttaccacctaagctgcggatcaaaaagggaattcttccattagaaatttgtagtgttgtgtggccagcacagtatttttcagatttgaatttcagtacctctgtgtagcctcagtactctcaacaccagtcactctttattgtcttaaaatattccatactttttgttgacccaaaattgttgaaaatattttgctcagttttcacaatgaactaattgaaaagtgtagttactgtgttgtaaacatttgtgtagttctgttaatacactgatttgaattttatttatctcaacttcctttagcgtctgcctccaaattttgtctttgctgtatacccactgagatcaattccctagacccctctggctcttagtgtactataatttgggctttataaaatatattgtcttaatttaaatagaatgtgagccctctttttttttttttaagccaaataactacacaaagtaaattataaaagatttaaatagtttgtctacagtgactagactgaaatataaaaattgattgagggtagtttacttcaggtgttagctacaaatgactaaatgtccttaaataatgcagatatctgccctctgaacaaaaattttggcaaagtaaatttgtagcaacagacttaacatgatttattgcttatgttgcccatttctgctaatggaaaagataatttaaaaatatgtggcagaggacagatattagaaatactttttggttacagaaaccattgtaaactcatcctcatttataaatggtattatgctagggagtaattggactaggaatgtttaaagataagtaaggaaacaatgtgtgctcaatcgtcaaagaacttagttatatcattgggctttgaattatctaagttgattacataattctatattcttaaggagtcttaactcggtacttgggttaacgccagaaattacttttaattcattgtttttttcactgggatgagtagaactctgcttttagtaaaagtgacagaatataggtaaaatggatgatttgggatcagagcttttcatcttgatattttagcctgtaaaataaacagctatattgttttgccctttaaatgttatatatatttttctgtctttctttccctagttgtaaaagtaaagcatattctttatagaaaacttggaatatcctgaaaggaatcaagaagaaaagaaaaatcacccttataactctataagccatagaatatccacagtaaacattttggcatgcttcctttcagtctcttgtgcacatagattcttttgcctcataactgggatcattttttatataagtttggtagataatatattttatgtgcctgttgaaagaacaaatcatctttgctttctgaaaaattgagattgtattttattaatttcacatgagtttttcatctttggcagcacagctttatgtttttctttaaacagaagctaaaggccagtttcactcacaaagatgccttttctaaattataattttaagtagcataa

SEQ ID NO: 664 - DNA, 7569 bp, Homo sapiens
actgacttccggctacgccgttgtctgggtggcgcggtcgagtcatcgcagggcctcaccgcttcgttctcccgtccctccccgcgccttggcgcggggggtcgactagccaagtgaggcgggaggcgactcggacctttccctgcatttcgtttcggccagtgccgggggctacccgccctggggcctgggatccttggggcccgtgaggcccactcttagcggccggggcctaccgcggcccgccgctggccctcatgaggcatagcctgaccaagctgctggcagcctcgggcagcaactccccaacccgcagtgagagcccggagccggctgcaacttgttcgctgccctctgacctgacccgggctgcagcgggggaggaggagacggcggcggccggatctcccggccgcaagcagcagtttggcgacgaaggagagttggaagccgggagggggagccgcggcggcgtggccgtgcgcgcgccctcccccgaggagatggaggaggaggcgatcgccagcctcccgggggaagagacggaggatatggactttctgtctgggctggaactggcggatctcctggaccccaggcaaccggactggcacctggaccccgggcttagctcgccggggcctctctcctcgtctggcggaggctcggatagcggcggcctgtggagaggggacgatgacgatgaggccgcggctgctgaaatgcagcgcttctctgacctgctgcaaaggctgttaaacggtatcggaggctgcagcagcagcagtgacagtggcagcgccgaaaagaggcggagaaagtccccaggaggaggcggcggtggcggcagcggtaacgacaacaaccaggcggcgacaaagagtccccggaaggcggcggcggccgctgcccgccttaatcgactgaagaagaaggagtacgtgatggggctggagagtcgagtccggggtctggcagccgagaaccaggagctgcgggccgagaatcgggagctgggcaaacgcgtacaggcactgcaggaggagagtcgctacctacgggcagtcttagccaacgagactggactggctcgcttgctgagccggctgagcggcgtgggactgcggctgaccacctcgctcttcagagactcgcccgccggtgaccacgactacgctctgccggtgggaaagcagaagcaggacctgctggaagaggacgactcggcgggaggagtctgtctccatgtggacaaggataaggtgtcggtggagttctgctcggcgtgcgcccggaaggcgtcgtcttctcttaaaatgtagggtcaagtaatctgctctttatccgcgtttacccctttcaactcccttacaccatgtcaaacttaccttagtgggacatcttcaccggacacatttcagaggagagaaaaaaagtaatattgaatcttaaagtgtttagctaaaagcatgaatgtgacacagtaaccaactcctaatgataacatgtgactattaaatctctctgacagtttcttttttaggtgatttccttcctgccaggctccgttgtaggggttacagaacagtcgttcccgcctcacaacctggtaaggatccatctcttcccgtaacgctcatgctctgctgctttgtctactttaatgggcaacatctcagtttgtgtgtgtgtgatttttttttttttttctgttttggaaggtgggagggaaatctaatttgggccctgtccaccctggaaacagacttgtgctggtcaagaatgtatttaagatgcctcttctggttgaaatagctattaatgtgtccccttattcagacttgcgtgtacctagctcttctgtccccagtgtggacatggccttggatgacatcggttccaactgtacactgaaacctgcttatagagagacagtttggagacagtgaaacaggtgaagttgaatggaagttccgagttgtacaaggtgcaaattggaattccgattttagggcaacttttcagaggttgacagttaagtatttggggcatgcacaaatgtgatagttattttgctggaggtgacaggtatctcttaaatatcaacaatgccttttagttttcagtatgagatatagaaacagtctataatggagtaacattttaatgtctcaccattagagaagttggaaattaacatacatatgagactcctgcgttttagttaattggagaataagaatggctaatgtttctttgaggaccagcagtgattaccctatcactgagattgaataaattgttgaacatctttatttttgttgtattaaaattttaggttaaatttatatatgtatgattagatattgaaggttgtgaaatgtgaatgaaaacgtgtaaagtgaggcttcacaaagaatcttattctctgtgtttcaaaagtatttgtcctattttaaaataattttttaaattgagtggttctggccacttaaatgacacgattggtactattttcctaaggtgggatttattcccttgaatctattaaccagttgtataaattgaattatggtgtccttcagtgtaagaggcattaagaaattctttgtgaaacatcactgcttgataaagtatatacgtatttagcatccttgtttttctttgtgctaaagtggatacagctgttggggcagaagagacgggaccagctgctggccacatttcctgctttattttaaaaggtagtataagaaatgaggaaaaagaggtaatatcagggcttctgctgttttttatttttaacatgttcataattaaaaagtattttccagcagtccaaagatgtaagttatcttacacataaaatgttttattttgttatttggttatgaaaatggaatccttgttcttgcacaactgtaaatgttttgttgctagataatacgatttgagacctgaattggtctttggtttccagtgcatcacagcatattttgtaaaatcatctactactgcacttgagcatgaatgggtagtagccaaactcacaaattggagtgatgaacctgcttatacctaagggcaggagcaagcccctcacaatgcagctgcatgggtttttagtgcctactgaattatatatatatatacatatatatatatatatataaaccaaaagtagttggaaagattatttgaaatgactaatttgtgctatctttatgaaatatgttaaatgtagcttttttgaaacagaagccttgaattgaaatttaactaatacttgaacattttgtatatatttctttgtatataattttgtgcagtaccaatgacaaaaatatggtgtcataataaaaccaggtttgttgatcttttagttatgggctcaaagaatttattcatctctaacatgatattggaaaataatggatgaaaataggaaaaatgattgttaatgctgactgtgggtcttaaaaggttctggaaagcagtaagttcatttttctaaaaactataacattctgttggagtattttcttccttacgtcaatacttttcctgcattatttgaaattgtgggctggggagaaacagtagtcaaagctttctgaattgagatactttgaaattccaagtgtagatttttagaatgtcattttataaatggcagtttttggaattacttgataagaacttttgaaaatggaaggattagtatggcctatttttaaagctgctttgttaggttccttatgttttattaactgtcttttctcagtttccatttcatttttttttttctagttttggtgacttagtgattttgtcattttttacatcaacttcatggtcttgtttttacatggtaattgcatgtacttaggatctatctaataggggctttaaataaatttggtcatatttatgtgtaagcacattttactgtaaatgtttgggtttctgaatttaaacagatctgtttatttcagtatgtagtaaacaatatcttaaagtgtccgattcactacttgttaattaaaaaagttatgattaatgtgaaactgttgtcttactatttttagaaaattgtgttctggatgattagcacatggataaaggagatttctggaatataaaatggattgtttttgaaatttctaggtttggctctatttactgtaatggttgaaaacaatttagtatttgggtgacccttttgtttttcttctaaatgtgcctctggtaaaatacagaactagactaaagatgtagctttttaatatttgtcttttgatggtggcaggagttcatacattaattgaactaacacatcatattttgacctactatttctatcatattgacttactgtttctgcacttctttgaccagacttatcttaaaaagtccacttttgttaaaatgtagtcacacctctgatataatccaacaagaagtgttcaaaatattttaaatatttgtgcattttataatcactaaattaatctctctctcttctctttgaacagcttagcagtgtctgcaaaaacgaatcttttcctacaacctgttaactgactggactgttggtaacaaagtaattgtgagaaccatgtcggtcaaaaatttggcatctgctgaaaaaaatgaatgccattttcaagttcccaaattacttctatactgatttcactttccagaaatggagatatgaaaagattctctggaatccttgaaagacttaatagagatacatgagactaagttaatcttggaacaaaattatactttttttgtctttcatgggagtgatactcagttattgcatatctttacaaaattgtaacctttggagaattacagtatttcatcaagaaattagagtttttacataatcaagagcatattctatggaattaacatttagtggactagaattacataagcaggccatcagtgatcacaaggcatatgagtttgtatttatttcctggaacatgagagctaatttggagtacagacagacaccctgctgagtagaatataaaagttaatgtaaagttctgaactataaagagtagtccttttaaatagatgcattgatttgtatatctttgaaaaagttgattatgattaaatgtgtgggtagttaattacaatttagggtaacaaccaggatgtatggattcttgaggttttggcttcttgagctttctcttgagtacttgatactgttttctgaatattttgaggtttctaattaatggtatgctagtttctactgttttatataaaaatttatctagtgttgtataaggactttagtattgtggatgatgggagtggctttttgtggcatatggttgttttaattgaaatattttttcagtttattacaagtgtgaaaaaacactcaaaactctggattgttttatttcatttttgttggattatgttaatacattccttcacgtggtttagattgagtcattttatctcacttacttggaaatgtgcagctgatagaagagggattgggtaggagattggcttttacttcataataaatatacagttggttattgtattattcaaaacttattaaatccattcagtttcttaccattttaagtgtattcagtgcctgtgaagccaggcagcagagtattcccactggcttaaaacttaggcgctgatgctcctacagtacagctagttataattccagaaccaaaggcaccaacattatttggtgaccttaactactactttgatagaacagactgggtaattcactgataatgagtcattacctttttaatatgtgattatctagttcagcattttgaatgtgtagtttaaggtctgatttagtaaaattttaaagctaaataatctgatgactcttgaaagtttaattggtagtatgacatttatgtttttttcccccagactcacagccaatacaaagttttgagactcctaaatgttaatatttttgctgtttttctgagctgtttttttatttacttaccacctaagctgcggatcaaaaagggaattcttccattagaaatttgtagtgttgtgtggccagcacagtatttttcagatttgaatttcagtacctctgtgtagcctcagtactctcaacaccagtcactctttattgtcttaaaatattccatactttttgttgacccaaaattgttgaaaatattttgctcagttttcacaatgaactaattgaaaagtgtagttactgtgttgtaaacatttgtgtagttctgttaatacactgatttgaattttatttatctcaacttcctttagcgtctgcctccaaattttgtctttgctgtatacccactgagatcaattccctagacccctctggctcttagtgtactataatttgggctttataaaatatattgtcttaatttaaatagaatgtgagccctctttttttttttttaagccaaataactacacaaagtaaattataaaagatttaaatagtttgtctacagtgactagactgaaatataaaaattgattgagggtagtttacttcaggtgttagctacaaatgactaaatgtccttaaataatgcagatatctgccctctgaacaaaaattttggcaaagtaaatttgtagcaacagacttaacatgatttattgcttatgttgcccatttctgctaatggaaaagataatttaaaaatatgtggcagaggacagatattagaaatactttttggttacagaaaccattgtaaactcatcctcatttataaatggtattatgctagggagtaattggactaggaatgtttaaagataagtaaggaaacaatgtgtgctcaatcgtcaaagaacttagttatatcattgggctttgaattatctaagttgattacataattctatattcttaaggagtcttaactcggtacttgggttaacgccagaaattacttttaattcattgtttttttcactgggatgagtagaactctgcttttagtaaaagtgacagaatataggtaaaatggatgatttgggatcagagcttttcatcttgatattttagcctgtaaaataaacagctatattgttttgccctttaaatgttatatatatttttctgtctttctttccctagttgtaaaagtaaagcatattctttatagaaaacttggaatatcctgaaaggaatcaagaagaaaagaaaaatcacccttataactctataagccatagaatatccacagtaaacattttggcatgcttcctttcagtctcttgtgcacatagattcttttgcctcataactgggatcattttttatataagtttggtagataatatattttatgtgcctgttgaaagaacaaatcatctttgctttctgaaaaattgagattgtattttattaatttcacatgagtttttcatctttggcagcacagctttatgtttttctttaaacagaagctaaaggccagtttcactcacaaagatgccttttctaaattataattttaagtagcataa

SEQ ID NO: 665 - DNA, 7569 bp, Homo sapiens; identical to SEQ ID NO: 664

SEQ ID NO: 666 - DNA, 8896 bp, Homo sapiens
ttacaagtctatgtttatgcataacattagacataacattagacataaactgtttttaccattttatttttgtttacatatttgtttaaaatcagtgaatttctttgccaggttcagataactgaagggcctttataagtagtttatattgttcagacccaaggtatgctgaaaacatagtctggagcaaaataggaaataacatctttctaaagacaggcttagaagttctaatccagtaacttaagatgttccctttgtgtggtaacagagctgattgatacctgtaagaaaacattgagatagttcaatagaaaagattgttgcatcaaatggcaaacccatctgtgatacatattagtcctagaagtcttaagataaaactgaatattaaagtaaaggtcttcagtgtctattaatcctaaaaacttttgtttctttatccagtttgcttcaaggctatagcatagattgctgatgcaagagttcaacagagaatagccagaattattttagaatagaaggctaatataacagctagacattttctgatggaattttcctttagtgcaagtgttcaaactcatccaagataattgtttatatgatagaagtttcatgcataatactgtttgcagctttgtagttagtttagtattcagtacacaaattaaggttaatagcctaactacacaccaagtataactgtttgaaattcttgataagtagaatttcattataagaaaaaacaggtcttgctaacttctaatcaagagggtaacattgcctttggtctaaatgccttaaaaacaaaatatatttgctgctttaagttgtgagttttataggtaatcacatattataaaaagttttttatttcctacctggctgctagaccaccatttacaggtatagccaagaaaacagggtatagaccaccaataacaagaccagtcagtccactccgtgttatggtacaggtttcacaatccaaatcacctaggaaataaattagtcatagaaatgaaggtcatgatagtcaagcaaacatgatttaaagaatgtaagatcctcttttgtgtatcacaggtatttttcaggtaatatatcaaatgtaattgtacaaagcctgttaaaaggtataattacatctatgagtaacttaaaatagctaggaataattggtaaaactattttaggaaaaaaagttctctaatttgttctcaacttagatataataatctcatggtttgggctactgctagctttctgccttgttttttatcaacagacctaggctaatattttcactcagtctgttcaattaaatgggcgataggtcttccttgatcatagaaattgtttccactggtgcatgggaattaaaacaaaatactcgtcaaatttaaacaaatttggagcagcacttaacaaaatttagatggactgccttccctagcacccatggtaatatttttatttgaaataattaatcaaaagttttttttatgattaactgtactcaaagtattcagcacacatggtagattttcaaaaggaaatcaaatctccatgtatttgataaatgtatatgcatttagtgctttaagagatttactgtataaagagttattcccataaaaatattttccccctttaaggaacttctctataaaatataaataaaaaatctaaggtagccaacatattatttatatacatttgtatatatataatatttccatatatataattttcatatatatgtatatatggatttccaaatatttcttactctaaatgagcactgtgagaaagatatgttagaaaaagggaagtattgccgggtgcagtggctcacgcctgtaatcccagcactttgagaagacaaggcgggtggattacctgaggtcaggagtttgagaccagcctggccaacatggtgaaaccctgtctctactaaaaatacaaaaaattagccgggcatggtggtgggcacctgtaatcccagctactcaggaggctgaggcaggagaattgcttgaacccagaaggtggaggttgcagtgagccaagattgcgccagggcactccaacctgggcaacaagagcaaaactccatctcaattaaagaaaaagtatttagaactgctgtgtatgtgcatcttggttggtagaccatactaatatgaattatttgccacattatataggctagcaagatttaatcttaactgcattacagcatacagctacttgatattaataagtatggactaaagctgcaaataacatatactaaggcaaactctttggtgatagtgaagtagaatttacctgtattcaaaggaaaacttacaaaacatctgtaagttaagtctgttgtaagaaaaggtatccctgccattggtaagccagcagctatgcgagcctttgtcacattcaagatgcgtcgaaaaagactgtttgctatgaggccacaaagagcagcatttaatccaacataaaccgatccattttcaagtagattcctgaaagggtgagaagaaagaacttttctttggcattattgtgtgtgtgagctttcccgatcttgacatgtgttataggactttgggaatacactaactggatacgacatctatcccttatagaaccaaaatcttaaaaattgctttatatataggtttttgctcttctcccagcagccagtgggtgcctctcctgagctcccataataattaatacttaacctctctagcacaacacattacaagacagtactatcttatataatcaccgatttacatgtcaggcttctacactagtctttaaacaaccagaagacaatggatacaaagatgtattcagcctgacacagaagatgttcaataatgtggagttaatgtgatttctttcactcttccctgaaacattagtgtcaggattgggagtattaacatttaagcaataccctatgctaggtactttataacaacccattgatgagaaataaactgatgttttcaggtagtggtagaactggatttgaagccaggttatgtatgaacttttaacttatgtcctatgcattctttagttttgggaaaaagtaatacctaacatgattgctgaatattgaaaatactgactccaaacttttcagactacgacttagcttttttaccacttacattgccatctacaatacagtcttaagattttcactactcttaactagccaaagtagccacagagtacctcctctaacttctatggcttacactcatcttaaaatagcttttctaggaactcagcttcctacgttgtataaggtattgcttttcttatctgacactttgcaatcatgatgcctgtcactcattgagaaccccactgtatgcagcagacttagtgctaaaggcacaaaaaattaccttctatcttcaaggttaacatagttaaatattactggagaagaaagagatgtaaacgagatataacagaagtctatgaaaatggtaatggtggtacaagacagtggcagttcaggaacttggagtacatagattataattagtgatgacagtctggagaacctaccaaccacaaaaaccatgtaaatgtgaaaagcctattttttttttgtgggggttggaataaaaaacttgaacacttcctctaaaatatttcatcataaaaatcatgtgaaatgtatattatccccattttaaatcccaatgctcaggtaaacaatttgcctgtatgtatatataatatatataaaatacatatatacatgttatatataagtccatttgtttacaagtatgttacatatacaaataaataaaaagtagtacaagtgaaatctgcatagcaaactttgctctctcccaaccagatttttcccatagctaaggtcaaaatgtttagttaattaaaagttagcacaaaattgttacctagcagccccttgccagttttccaaaaaagtacctataccaactaaaaactcatgactttttgataagacatacacaagaaatagacatgaaatagcccaaatttaacaaatgacaaacatgtacgtgaaagtattgctgtagatcagaaaatgaagtttttgatattaagaaagctccatacactgaaggacatgccaagtaaccattaaatacctgattaataatccaagaagaaatgaagatttaaacttagaaaataaaatgggaatgaagagaaaaaataggaacaaggcaaagataacaggacactgtaatctgcctagtttagatgccaatgattgaaacatttattgcctctaaactaaattttactttgcagttccaggtattctttctaatttggtaaagaacccagtgacagactgctttcttctcttcaaagctgccaccatctactcttttttgagacagtcttgctctgtcgcccaggctggagtgcagtggcatgatctcagctccatgcaacatccgcctcccaggttcaaacaattctcgtgcctcagcttctccagtgggtaggactacaggcacgtgcccccacatctggctaatttttgtatttttagtagagatagggtttcgccatgttggccaggctagtcttaaactcctgacctcaggtgaccagcccgcctccgcctcccaaagtgctgggattacaggtgtgagccaccatgcccagcctactactcttttattagtctttctcactttccctatcttgctggcctggaaacatggacatagttccttttttgctttaaaaggttttccgttacctcaggaaaacaactagaagggagtggagttggagtgtggggagggggggtgaaagagcttttaagatctcaccaagttcttactactggccttttttttcttccccttggagatccttgttctgaacactactggtcttgatttatgggttctccctgattaagatggtaagtggcagcaagatggggatttgttcagtttctattcctgaagatagcaagattatgcttccagaatgtattttaaatgcatcctcttttcatctcagctgtcaccacccctaccatctccactcaccaggattactgtgccattttttctactggtatttgtgtttcctttctttcctacctcaaatctgctttccaaaaagcagctggaatgttctttagaaatgctaacatcatccccctgctcaaaactattcctggtccttactcccacttccttagtacttcggtaacaatggttactcaagtaccacaagccttggctatcttgtggctaggcatatgccattccctctacttaagacactgtccctctctccttcccaggtggctgcttttcatccttttatagtcagagagaccttcttgactgtcaacaaagtgtaagacattttgtggaagtacacattagctgcctggcaaagattagtatgttccctatattggtttttctctttaatatctttttttttttttttttttttttgagacggatcctcactcttgtcgcccaggctggggtgtagtggtgtgatctcggctcactgcaacctccgcctccctggttcaagcaattctcctgcctcagcctcccaagtagctgggattacaggcacctgccaccacgcccagctaatttttgtacttttagtagagatgaggtttcaccatgttggccaggctggtctgaactcctgacctcaggtgatctgcccaccctggcctcccaaagtgctgggattactggcgtgagccaccatgcctggccctctttaataatatcttaaagatctttagccatgatcctatttctctgacattctctatcttgctatgtgtgttctatggtactcttagactggtaagcatactgacagaatgaactgggaaaaaaaagacattttaaaagttaaagttttgttatttaaatgggtctgtaaatgtttacattttactatactccaagcctaatggaaaaactcaaaacattatacaattaggtatgtccaaagacatgagttccagcctcaccttccacaattagctatgtgatgttgagcaaaatggttaaacgctctcatccaggcaagaaaagggcaatttccttctcacattccatgttgtttatactcaaaccagataaacttgagataatgaatcaatggtgaaaatccacctgataaaaggtgtttttaaattaagaagggatcttacctttctgcttctggaagctggttaatttttctggatatatcaacaattgttatgttttccttattattggatttatgattttccattttgagccttaaaaaacatgaagatatcatttctcaagaatttatacaaagaattttaaaaaccttctgaagactaaaaataatactgtagagctaatctgaaaaaaatcattgcatacatattattaaaaaaaaatctaagtgaaacagaaaccagaacatgaaaagcaacacataaagcttttaggaaatacagaatatcttcataatccttgaaagtatttcctaaacaattcacaaatagcactaaacataaaagacttataaaactaacagtattgaagttaagaacctatggttatcaacatataccataaagataagctagtgggggagaaaatgcaatagaactgacaaaagagtagttagtacccagaacatacatggaactacatatcaacatgaaaaaggtaagcagccctacggaaaaactgacaaaatatttgaacaggcacttcacaaaaaggaaagttaaatggccaataaacatgaaaatatgctcaccttcattataactgggggaacaacccacagtgagataccaataggtacccataggttagctaaaatcaaaatctgacaattccaattattggcaagaatgcggggtagctaaaactacattctgtgtacattctgtggggtagctttacccaaactgtacagtcactttgggaaagaatttggtattatttagcagatagaagacacacatagctagcaatttcatttctaggtatacctgagatcagggctcagcaaactttaaagggccagatgtaaatgtggtaggctttgcaggtaacatacagcctttgttgaatatttgtttttaaaaaaactataaaaacataaaaatcattcttagctgggtggctgtaccaaggcaagctataggctgcatatggcctacatgccagtagtttgttgatgtctgcactagttagggtgaaaatgtgaagggaatggtgaatgatgaagatttggctcaggtttcagggtaacagttaagaaaaacaaaggctggatgcagtggctcacgcctgtaatcccagcaccttgggaggccaaggcagacggatcacctgaggtcaggagttcgagaccagcctggccaacatggtgaaactccctgtcttttaaaaatacaaaaattagccaggcacggcggcagctgcctgtaatcccagctactcgggaggctgaggcaggagaatcgcttgaacctgggaggtggaggttgcagtgtgccgagatctcgccactgcactccagcctgggtgagagcgagactcggtctacaaaaaaaaaaaaaaaaacagttcagggataacaacaaaggaaaacatgcttttatgaaaccagattttctcatttcctacaacattacaggcactcgtttaaatatttattgctacctgttttatatcgataagaggtcatttggaaatgttgattaccttgacattccatatctctagacttaaagctaacctaataagtacaaagcagccttagaaatttatgtctaggtttctggtagtcaaatttttgagggccttggctacgataagatgataagacacaatctctgctgtacaggagctctgaatgattttgtgtatggggtggtgaaatatataatcaaatttagtatgtatatattgtactgagggcaattaagtcactcaattcagtataagtgctgactgggcagcccctgtgggcattttgtctccgatattaataacaaatatctatcaaagacaacgccgcctgtaaaaactacaaatatttcgaaagatttttgtgttacctatctcatgtcattcttggaagagctctgagagataggcagtgtggggcctatctgaaagagaagtaaagtgggacctctgaaaatcaaatttggccgtggtcaccttgtaaattgacagtaaacctgggattaaattcaatctcaggcatttctcctttctactgagttaatttaaatataaggtctttccttctagagtgcaaagtgaaaagacagcaggaagagctaactacacttctacttgctctcatttacgcgcagcgctgctggtagctagcgtgtcaccgcgtcgtgcttctcctgacaccgggacatttacttcaccccctcccccggaataccagtaccttatgctctcctcccagcagcctgtgggtgcctcctccttcctcagccacgccggagttcactgtggcctttgctcaaattacctgggcgcagccatctttggctgactcgtgacgcggcgtgggcgggcgccgggtcgcggctgctaattggactgcgggacggaggttgcagccagcagcggctttgggctgagaagcttccggccctaggaggtgccgggaggctaagcgttgaggtttgtttgcctggcgtagagtgtgctcgtttcacctactcttgcctcccaggacagaacttgtagaaattgtgaaatttcgagatataagttgggtgaccctcagtcagcctcttccattgaaaacgtacctcgggcatattacttaactt

SEQ ID NO: 667 - DNA, 2666 bp, Homo sapiens
ttacaagtctatgtttatgcataacattagacataacattagacataaactgtttttaccattttatttttgtttacatatttgtttaaaatcagtgaatttctttgccaggttcagataactgaagggcctttataagtagtttatattgttcagacccaaggtatgctgaaaacatagtctggagcaaaataggaaataacatctttctaaagacaggcttagaagttctaatccagtaacttaagatgttccctttgtgtggtaacagagctgattgatacctgtaagaaaacattgagatagttcaatagaaaagattgttgcatcaaatggcaaacccatctgtgatacatattagtcctagaagtcttaagataaaactgaatattaaagtaaaggtcttcagtgtctattaatcctaaaaacttttgtttctttatccagtttgcttcaaggctatagcatagattgctgatgcaagagttcaacagagaatagccagaattattttagaatagaaggctaatataacagctagacattttctgatggaattttcctttagtgcaagtgttcaaactcatccaagataattgtttatatgatagaagtttcatgcataatactgtttgcagctttgtagttagtttagtattcagtacacaaattaaggttaatagcctaactacacaccaagtataactgtttgaaattcttgataagtagaatttcattataagaaaaaacaggtcttgctaacttctaatcaagagggtaacattgcctttggtctaaatgccttaaaaacaaaatatatttgctgctttaagttgtgagttttataggtaatcacatattataaaaagttttttatttcctacctggctgctagaccaccatttacaggtatagccaagaaaacagggtatagaccaccaataacaagaccagtcagtccactccgtgttatggtacaggtttcacaatccaaatcacctaggaaataaattagtcatagaaatgaaggtcatgatagtcaagcaaacatgatttaaagaatgtaagatcctcttttgtgtatcacaggtatttttcaggtaatatatcaaatgtaattgtacaaagcctgttaaaaggtataattacatctatgagtaacttaaaatagctaggaataattggtaaaactattttaggaaaaaaagttctctaatttgttctcaacttagatataataatctcatggtttgggctactgctagctttctgccttgttttttatcaacagacctaggctaatattttcactcagtctgttcaattaaatgggcgataggtcttccttgatcatagaaattgtttccactggtcatgggaattaaaacaaaatactcgtcaaatttaaacaaatttggagcagcacttaacaaaatttagatggactgccttccctagcacccatggtaatatttttatttgaaataattaatcaaaagttttttttatgattaactgtactcaaagtattcagcacacatggtagattttcaaaaggaaatcaaatctccatgtatttgataaatgtatatgcatttagtgctttaagagatttactgtataaagagttattcccataaaaatattttccccctttaaggaacttctctataaaatataaataaaaaatctaaggtagccaacatattatttatatacatttgtatatatataatatttccatatatataattttcatatatatgtatatatggatttccaaatatttcttactctaaatgagcactgtgagaaagatatgttagaaaaagggaagtattgccgggtgcagtggctcacgcctgtaatcccagcactttgagaagacaaggcgggtggattacctgaggtcaggagtttgagaccagcctggccaacatggtgaaaccctgtctctactaaaaatacaaaaaattagccgggcatggtggtgggcacctgtaatcccagctactcaggaggctgaggcaggagaattgcttgaacccagaaggtggaggttgcagtgagccaagattgcgccagggcactccaacctgggcaacaagagcaaaactccatctcaattaaagaaaaagtatttagaactgctgtgtatgtgcatcttggttggtagaccatactaatatgaattatttgccacattatataggctagcaagatttaatcttaactgcattacagcatacagctacttgatattaataagtatggactaaagctgcaaataacatatactaaggcaaactctttggtgatagtgaagtagaatttacctgtattcaaaggaaaacttacaaaacatctgtaagttaagtctgttgtaagaaaaggtatccctgccattggtaagccagcagctatgcgagcctttgtcacattcaagatgcgtcgaaaaagactgtttgctatgaggccacaaagagcagcatttaatccaacataaaccgatccattttcaagtagattcctgaaagggtgagaagaaagaacttttctttggcattattgtgtgtgtgagctttcccgatcttgacatgtgttataggactttgggaatacactaactggatacgacatctatcccttatagaaccaaaatctta

SEQ ID NO: 668 - DNA, 8895 bp, Homo sapiens
ttacaagtctatgtttatgcataacattagacataacattagacataaactgtttttaccattttatttttgtttacatatttgtttaaaatcagtgaatttctttgccaggttcagataactgaagggcctttataagtagtttatattgttcagacccaaggtatgctgaaaacatagtctggagcaaaataggaaataacatctttctaaagacaggcttagaagttctaatccagtaacttaagatgttccctttgtgtggtaacagagctgattgatacctgtaagaaaacattgagatagttcaatagaaaagattgttgcatcaaatggcaaacccatctgtgatacatattagtcctagaagtcttaagataaaactgaatattaaagtaaaggtcttcagtgtctattaatcctaaaaacttttgtttctttatccagtttgcttcaaggctatagcatagattgctgatgcaagagttcaacagagaatagccagaattattttagaatagaaggctaatataacagctagacattttctgatggaattttcctttagtgcaagtgttcaaactcatccaagataattgtttatatgatagaagtttcatgcataatactgtttgcagctttgtagttagtttagtattcagtacacaaattaaggttaatagcctaactacacaccaagtataactgtttgaaattcttgataagtagaatttcattataagaaaaaacaggtcttgctaacttctaatcaagagggtaacattgcctttggtctaaatgccttaaaaacaaaatatatttgctgctttaagttgtgagttttataggtaatcacatattataaaaagttttttatttcctacctggctgctagaccaccatttacaggtatagccaagaaaacagggtatagaccaccaataacaagaccagtcagtccactccgtgttatggtacaggtttcacaatccaaatcacctaggaaataaattagtcatagaaatgaaggtcatgatagtcaagcaaacatgatttaaagaatgtaagatcctcttttgtgtatcacaggtatttttcaggtaatatatcaaatgtaattgtacaaagcctgttaaaaggtataattacatctatgagtaacttaaaatagctaggaataattggtaaaactattttaggaaaaaaagttctctaatttgttctcaacttagatataataatctcatggtttgggctactgctagctttctgccttgttttttatcaacagacctaggctaatattttcactcagtctgttcaattaaatgggcgataggtcttccttgatcatagaaattgtttccactggtcatgggaattaaaacaaaatactcgtcaaatttaaacaaatttggagcagcacttaacaaaatttagatggactgccttccctagcacccatggtaatatttttatttgaaataattaatcaaaagttttttttatgattaactgtactcaaagtattcagcacacatggtagattttcaaaaggaaatcaaatctccatgtatttgataaatgtatatgcatttagtgctttaagagatttactgtataaagagttattcccataaaaatattttccccctttaaggaacttctctataaaatataaataaaaaatctaaggtagccaacatattatttatatacatttgtatatatataatatttccatatatataattttcatatatatgtatatatggatttccaaatatttcttactctaaatgagcactgtgagaaagatatgttagaaaaagggaagtattgccgggtgcagtggctcacgcctgtaatcccagcactttgagaagacaaggcgggtggattacctgaggtcaggagtttgagaccagcctggccaacatggtgaaaccctgtctctactaaaaatacaaaaaattagccgggcatggtggtgggcacctgtaatcccagctactgaggaggctgaggcaggagaattgcttgaacccagaaggtggaggttgcagtgagccaagattgcgccagggcactccaacctgggcaacaagagcaaaactccatctcaattaaagaaaaagtatttagaactgctgtgtatgtgcatcttggttggtagaccatactaatatgaattatttgccacattatataggctagcaagatttaatcttaactgcattacagcatacagctacttgatattaataagtatggactaaagctgcaaataacatatactaaggcaaactctttggtgatagtgaagtagaatttacctgtattcaaaggaaaacttacaaaacatctgtaagttaagtctgttgtaagaaaaggtatccctgccattggtaagccagcagctatgcgagcctttgtcacattcaagatgcgtcgaaaaagactgtttgctatgaggccacaaagagcagcatttaatccaacataaaccgatccattttcaagtagattcctgaaagggtgagaagaaagaacttttctttggcattattgtgtgtgtgagctttcccgatcttgacatgtgttataggactttgggaatacactaactggatacgacatctatcccttatagaaccaaaatcttaaaaattgctttatatataggtttttgctcttctcccagcagccagtgggtgcctctcctgagctcccataataattaatacttaacctctctagcacaacacattacaagacagtactatcttatataatcaccgatttacatgtcaggcttctacactagtctttaaacaaccagaagacaatggatacaaagatgtattcagcctgacacagaagatgttcaataatgtggagttaatgtgatttctttcactcttccctgaaacattagtgtcaggattgggagtattaacatttaagcaataccctatgctaggtactttataacaacccattgatgagaaataaactgatgttttcaggtagtggtagaactggatttgaagccaggttatgtatgaacttttaacttatgtcctatgcattctttagttttgggaaaaagtaatacctaacatgattgctgaatattgaaaatactgactccaaacttttcagactacgacttagcttttttaccacttacattgccatctacaatacagtcttaagattttcactactcttaactagccaaagtagccacagagtacctcctctaacttctatggcttacactcatcttaaaatagcttttctaggaactcagcttcctacgttgtataaggtattgcttttcttatctgacactttgcaatcatgatgcctgtcactcattgagaaccccactgtatgcagcagacttagtgctaaaggcacaaaaaattaccttctatcttcaaggttaacatagttaaatattactggagaagaaagagatgtaaacgagatataacagaagtctatgaaaatggtaatggtggtacaagacagtggcagttcaggaacttggagtacatagattataattagtgatgacagtctggagaacctaccaaccacaaaaaccatgtaaatgtgaaaagcctattttttttttgtgggggttggaataaaaaacttgaacacttcctctaaaatatttcatcataaaaatcatgtgaaatgtatattatccccattttaaatcccaatgctcaggtaaacaatttgcctgtatgtatatataatatatataaaatacatatatacatgttatatataagtccatttgtttacaagtatgttacatatacaaataaataaaaagtagtacaagtgaaatctgcatagcaaactttgctctctcccaaccagatttttcccatagctaaggtcaaaatgtttagttaattaaaagttagcacaaaattgttacctagcagccccttgccagttttccaaaaaagtacctataccaactaaaaactcatgactttttgataagacatacacaagaaatagacatgaaatagcccaaatttaacaaatgacaaacatgtacgtgaaagtattgctgtagatcagaaaatgaagtttttgatattaagaaagctccatacactgaaggacatgccaagtaaccattaaatacctgattaataatccaagaagaaatgaagatttaaacttagaaaataaaatgggaatgaagagaaaaaataggaacaaggcaaagataacaggacactgtaatctgcctagtttagatgccaatgattgaaacatttattgcctctaaactaaattttactttgcagttccaggtattctttctaatttggtaaagaacccagtgacagactgctttcttctcttcaaagctgccaccatctactcttttttgagacagtcttgctctgtcgcccaggctggagtgcagtggcatgatctcagctccatgcaacatccgcctcccaggttcaaacaattctcgtgcctcagcttctccagtgggtaggactacaggcacgtgcccccacatctggctaatttttgtatttttagtagagatagggtttcgccatgttggccaggctagtcttaaactcctgacctcaggtgaccagcccgcctccgcctcccaaagtgctgggattacaggtgtgagccaccatgcccagcctactactcttttattagtctttctcactttccctatcttgctggcctggaaacatggacatagttccttttttgctttaaaaggttttccgttacctcaggaaaacaactagaagggagtggagttggagtgtggggagggggggtgaaagagcttttaagatctcaccaagttcttactactggccttttttttcttccccttggagatccttgttctgaacactactggtcttgatttatgggttctccctgattaagatggtaagtggcagcaagatggggatttgttcagtttctattcctgaagatagcaagattatgcttccagaatgtattttaaatgcatcctcttttcatctcagctgtcaccacccctaccatctccactcaccaggattactgtgccattttttctactggtatttgtgtttcctttctttcctacctcaaatctgctttccaaaaagcagctggaatgttctttagaaatgctaacatcatccccctgctcaaaactattcctggtccttactcccacttccttagtacttcggtaacaatggttactcaagtaccacaagccttggctatcttgtggctaggcatatgccattccctctacttaagacactgtccctctctccttcccaggtggctgcttttcatccttttatagtcagagagaccttcttgactgtcaacaaagtgtaagacattttgtggaagtacacattagctgcctggcaaagattagtatgttccctatattggtttttctctttaaaatctttttttttttttttttttttttgagacggatcctcactcttgtcgcccaggctggggtgtagtggtgtgatctcggctcactgcaacctccgcctccctggttcaagcaattctcctgcctcagcctcccaagtagctgggattacaggcacctgccaccacgcccagctaatttttgtacttttagtagagatgaggtttcaccatgttggccaggctggtctgaactcctgacctcaggtgatctgcccaccctggcctcccaaagtgctgggattactggcgtgagccaccatgcctggccctctttaataatatcttaaagatctttagccatgatcctatttctctgacattctctatcttgctatgtgtgttctatggtactcttagactggtaagcatactgacagaatgaactgggaaaaaaaagacattttaaaagttaaagttttgttatttaaatgggtctgtaaatgtttacattttactatactccaagcctaatggaaaaactcaaaacattatacaattaggtatgtccaaagacatgagttccagcctcaccttccacaattagctatgtgatgttgagcaaaatggttaaacgctctcatccaggcaagaaaagggcaatttccttctcacattccatgttgtttatactcaaaccagataaacttgagataatgaatcaatggtgaaaatccacctgataaaaggtgtttttaaattaagaagggatcttacctttctgcttctggaagctggttaatttttctggatatatcaacaattgttatgttttccttattattggatttatgattttccattttgagccttaaaaaacatgaagatatcatttctcaagaatttatacaaagaattttaaaaaccttctgaagactaaaaataatactgtagagctaatctgaaaaaaatcattgcatacatattattaaaaaaaaatctaagtgaaacagaaaccagaacatgaaaagcaacacataaagcttttaggaaatacagaatatcttcataatccttgaaagtatttcctaaacaattcacaaatagcactaaacataaaagacttataaaactaacagtattgaagttaagaacctatggttatcaacatataccataaagataagctagtgggggagaaaatgcaatagaactgacaaaagagtagttagtacccagaacatacatggaactacatatcaacatgaaaaaggtaagcagccctacggaaaaactgacaaaatatttgaacaggcacttcacaaaaaggaaagttaaatggccaataaacatgaaaatatgctcaccttcattataactgggggaacaacccacagtgagataccaataggtacccataggttagctaaaatcaaaatctgacaattccaattattggcaagaatgcggggtagctaaaactacattctgtgtacattctgtggggtagctttacccaaactgtacagtcactttgggaaagaatttggtattatttagcagatagaagacacacatagctagcaatttcatttctaggtatacctgagatcagggctcagcaaactttaaagggccagatgtaaatgtggtaggctttgcaggtaacatacagcctttgttgaatatttgtttttaaaaaaactataaaaacataaaaatcattcttagctgggtggctgtaccaaggcaagctataggctgcatatggcctacatgccagtagtttgttgatgtctgcactagttagggtgaaaatgtgaagggaatggtgaatgatgaagatttggctcaggtttcagggtaacagttaagaaaaacaaaggctggatgcagtggctcacgcctgtaatcccagcaccttgggaggccaaggcagacggatcacctgaggtcaggagttcgagaccagcctggccaacatggtgaaactccctgtcttttaaaaatacaaaaattagccaggcacggcggcagctgcctgtaatcccagctactcgggaggctgaggcaggagaatcgcttgaacctgggaggtggaggttgcagtgtgccgagatctcgccactgcactccagcctgggtgagagcgagactcggtctacaaaaaaaaaaaaaaaaacagttcagggataacaacaaaggaaaacatgcttttatgaaaccagattttctcatttcctacaacattacaggcactcgtttaaatatttattgctacctgttttatatcgataagaggtcatttggaaatgttgattaccttgacattccatatctctagacttaaagctaacctaataagtacaaagcagccttagaaatttatgtctaggtttctggtagtcaaatttttgagggccttggctacgataagatgataagacacaatctctgctgtacaggagctctgaatgattttgtgtatggggtggtgaaatatataatcaaatttagtatgtatatattgtactgagggcaattaagtcactcaattcagtataagtgctgactgggcagcccctgtgggcattttgtctccgatattaataacaaatatctatcaaagacaacgccgcctgtaaaaactacaaatatttcgaaagatttttgtgttacctatctcatgtcattcttggaagagctctgagagataggcagtgtggggcctatctgaaagagaagtaaagtgggacctctgaaaatcaaatttggccgtggtcaccttgtaaattgacagtaaacctgggattaaattcaatctcaggcatttctcctttctactgagttaatttaaatataaggtctttccttctagagtgcaaagtgaaaagacagcaggaagagctaactacacttctacttgctctcatttacgcgcagcgctgctggtagctagcgtgtcaccgcgtcgtgcttctcctgacaccgggacatttacttcaccccctcccccggaataccagtaccttatgctctcctcccagcagcctgtgggtgcctcctccttcctcagccacgccggagttcactgtggcctttgctcaaattacctgggcgcagccatctttggctgactcgtgacgcggcgtgggcgggcgccgggtcgcggctgctaattggactgcgggacggaggttgcagccagcagcggctttgggctgagaagcttccggccctaggaggtgccgggaggctaagcgttgaggtttgtttgcctggcgtagagtgtgctcgtttcacctactcttgcctcccaggacagaacttgtagaaattgtgaaatttcgagatataagttgggtgaccctcagtcagcctcttccattgaaaacgtacctcgggcatattacttaactt

SEQ ID NO: 669 - DNA, 6516 bp, Homo sapiens
gggttgcgggctgtggccccgggggctgagggcggcgcgggtgcggcggaagcagggaagccgcgaaccggccttctggctggccacagcgccctgcacggacgatcagtgaatggagattactcaagtatttatcgagaacttgcagtgggctaggcacagttcaggtagatcaacaaaccgaaagaccctgccctaggggagctttcgctccaatgcggggagagggtggatgattgcagttttgcccagtaatttttgggaccctcatgccaccattaattagctacacacatttcaccgaaagtctaccttacatattaatcagaagaagtggaagaataaacacagaagaagcaaaaaaggaaggaactttctcactgaaagtttctatttaatattaagtcttaaaagtactcctggaaggacaaaaggtgttcttaataaattatattcgcaaatattggatttaatcctaccagtaatgaagcagtcagttactttctagatgtgcagaaatacgtaatgaacaaaaaaaactaattcctattccattttttattaggtccacagttatttcacttctaaataaatatggttttttaaaagtggcacgcggtggaatgtaattgagacaggatggagttcctagagaaattttacttcctcaatctgcactccaccttacttaaaatacagtcttgggtctgtaattcccttatctgactctcaaggaaatgacaaagtaatgcctagattggactaaacctcatttaacttcaaggctgacctttctcaaagttgaaccttcgtcttgtgaggaacagaaagatcaagaactctgaagcacctcgactttccacctgtgaagatgtgttcaaatttgcaacgtgcggccacacctatgaggttgaactttatacaattggtttctttataggtttagatggttgaatttaagttacccccactgctattattattattttgagacagagtcttaactctgttgcccaggcaggagtgcagtggcgagatctggactcactgcaacctctgcctcctggcttcaagcaattctcatgcttcagcctgtagctggaactacaggtatgtgccaccacacctggctaattttcgtattttttagtagaggtgggggtttcaccatgttgaccaggctggtctcgaactcctgaccgcaagtgatccgccattttttgagacggattctctgttgcccaagctggagtgcagtgacgccatctcggctcactggaacctcctccttccaggttcaagcaattctcctgcctcagcctcctgagtagctgagattacaggtgccctccaccccctgctaatttttgtatttttagtagagacagggtttcaccatgttggccaggctagtgttgaactcctgatcttcagtgatccacccgtcttggcctcccaaagtgctgagattacaggccactgcacccagccttttgctacacatttatactaaactatattatggggcagcacagtaggtttgtttacaccagcatcaccagaaacacgtggttaatgcattgcgctacaatgttacagtggctacgacatcactatgtgataggaaattttcagctccattaagatcttatgaaacaactgttttatatgttgtttgacctgaatatcattacgtggcatatgggtatatgtcctccagtttttcaacattccttccttcaaaaagaggcaattcgttcccccaccttgagtgtgggctggacttagtggctcactcctaataaatagaaggtagcataagtgatggtatgtgacttccaagactaggccagaagaggcatttgagggtttctgctttctttctctcaggtcactccctctggaggaaaccagctgccactttgtgaggatactcatagtcctgtggaggcatatcctccatatggctgagacctcctgcgaacaaccatcactgacttgccagacatgagtgtgccaccttggaagcagattttccagccccagttaagccttcagatgacatcagcccctgctaatctcttgactacaacctcatgagagaccctgagccagaactagccaggtaagccactcctgaattcctgacccactgcacctgggagagaataaatatttgctgttttaaaccactaaattttattgtaatttgttatacagcaagagatagctaatacacactgctaaagcttacaatcttttagaattgactgagacatcattacaattcagtgtgatgatggtgactctaagaacaacctgaaatatgcacactctgagtacaaggaaaaggtaacctaattctctctggggtgtaagggaggaggtcatttgggctgggcctttacctgacaaatggtactgacagagaatgcagaaaaggagtgatagatgaatttggagagttaagatagaactggattgtggcaggttttgtatgctgtgataaagaattgtgactttattctgcaaacaatgggaaggaatggaaagttggtgttttttgtttatttgtttttgagatggagtttccctcttgttgcccaggctggagtgcaatggcaccatctcagctcactgcaacctccacctcccgggttcaagagattctcctgcctcagtctcccaagtagctgggattacaggcatgtgccaccatgcccaactaattttgtatttttagtagagacagggtttctccatgttggtcaggcttgtcttgaactcccaacttcaggtgatccacccacctcagcctcccaaagttctgggattacaggcgtgagccactgtgcctggcaagaaatggaaagcttttaagcatgaccagatctgtctttagaggagaactatcaggagtatggaagaccatcctgatttaaacaggaagaccactttggaaactattataacagtccagtaaagaaatggacacttctctcttctttttgagacagggtctctgtcacccaggctggaatgcaatggtgcaatcacagctcactgcagccccaacctcctgggcttaagtgatcttcttgcctcagcttccgagtagctgcgactacaagcacacaccaccatgcctggctaatttatttctattttttgtagagacagggtctccctctgttgcccagactggtctcgaactcctaggctcaagtgatcctcctgcctctacctcccaaagtactaggattataggcatgatccactgcgtctggctagcactcctcaaagaacagtagcagtaagaataaaagggagttgaatgagtcagaacttgcatctgggataacataaatgatggtgggaccattaaaaaatttatttggaataacagataaagagcatgtttaagggaggagaagaagatggcctctgctttgaacaagctgaggttgaggagccatggaacactttgacagctcagttggaaactgttggattggacttggggagggaaaatcacaactaaagtattttcagttcatcttcagtaggactgttgaggtcatcaggttatataagtgttctgagagaatgagaaaaagtctgaggtcagcagaatcctagtgaaccccgacactcggaatgggggaagatgaggaaaaggaaagcgtggcgtagaggaagccacgacataagaatttcgttaaggacaggttgaatcaggcagaacaagaatgagatgaaactcccagattcagccatcgtggcttttagagaccacttaattgaacattagagtgggcttaacagtaggtagaagttgagaaaaggaggtgggtaaaaacgtctgtttgtaaaaaaatgttttgtgagaaaaagagaaatggatggtgttttgagggctatggaagatctaaggaaggacctttaaattatatttaatttttgagattggagcatatttggagacagagaggaaaaacccaggagagagggaaatactgaaaatacttgagctacgggagatcagtgatgaaactgaggaggaggctagagggtggctccagcaataggaacaaaagggaaaactctcctgagatggatcagggacctaaaaatgggtgaatacagttccatctggatgtggaggaaataacaaccccttacgtttatattgcactttccagtcaccctgtgagggaggcaagacagttattaccagccctttcttgtagctgttctgagacatgaatgaccaagggccacataatgagtgggtagctgaagctgggctcagaccagccagtcaggctctcagcacagggttccctttgctggaccatacttcagcttgctcaggcttcctaaagcacagcactgtcaggcaggcaccacctgtgtccctctctgcctgcctagtcatggctgccaacaattcggctgtatcaacttttttttttttttttttttttttttttgagacggagccttgctctgtcacccaggctagaatgcagtggcatgatcttggctcactgcaacctctgcctcctgggttcaagtctcccaaaattacctgggattacaggcatgtgccaccatgcctggctaatttttatacttttagtagagatagggttttgccaggttggccaggctggtcttgaactcctggcatcaagggatctgcccaccttggcctaccagagcgctgggattacagacatgggccactgcaattggcctcaactcttaactaaattagattactccctctttacaaaacagaacttatggtttccaatctctatgtctgtgtgtttttgttcacctctcaatgttaaccatctttcaagataaagagtgtgcacctcttctatcactaagcttcatggcattagtctgggggcatcgacacagcaatttgtgtgtagctctcagctagcaccaggtcctcctgcaatcggtgtgtttgtctatgaattttacccctcattacatggtgcaatccttcaaggcatgaattctgccatggaatactgtcatagtctaacagcataaagcacaagagtcccgcatcttatgttctcatcagatattggttgaatgcatgattgaatgagagacgctgttgctgtaggctgtgtaagaatgaccactatccccagccttatctacatggagcacagcatgcttttgtgttgatgaattctttccagtagctgtcctttccccaaagtggaaaatttattttttcacataacaagaagcccagagttagtttattcctagggataagtaatgcacccaagaccagggtcttcctatcctcccactttgaaacttgtttgcttttgttgcaggcttacccctcatggttacaaagtggctgcaacagctccaggtgttctatcctttaacacagaataactcaaacaacaagacccaatattcagacaagaaggaaagggacttttggagagtgaagaaaactttcctagaaacctcaaacttctccccatgccttattggccagattgtatcccatgcccatttctaaaccaatcattggcaaagtgagtggaattgacgtgattagattaactttaccaagaatgcatcctcagagaggctgagaaaaagtccagcctcctttgaagagcctggctacctttcacctgaacaaaacaagaattctgatgaaaaatggagaatgtatgtggagcaggcacccggagtgtctatgccaggattttttttcagtgcgtttcaccggttatatttttgtctctttaccttacaagatatgtggcacgtttgcctaaaacaagccttgctttctgatttctgtgcactaggcacttaaaccttgcaaatgtcgcttacctaacagtcactgtcaaggagtacctggctaaagaatctccagctagacaaagtagaagtgtctgtgctctggcagttgaatatattgtatcaggctcaacagcacctttcaccaaaggatgagacttcacaaccattagatcttcttttattttgtttttattaaaaaaaaaaattttaacacaccattgctaacttgaagccattagatcttcttacccccaataccacaaaagtttagtggaatcaggggtataccaaggcaggtggagtaggggagctgggagtggtcagcccccagggcaggcaatgagggattgtgaatctgtgaagaattttaaagcaatgatacagctctaaatgcaatgtactatcctggacttagccctggaaaagaaaaaagatattagtggaaaaactggtaaaattcaaataatgtctgtagtttggttaatagtattataccaatgttaatttctgtgttttgataaatgtaccatggttatgtaagctggatgaaagatatgtgggaaatctctctactatttctgcaactctcctgtaaacctaaaaatgtttcaaaataaaagatttaatgctaaaattgactgaaaa

SEQ ID NO: 670 - DNA, 950 bp, Homo sapiens
cacgcctgtaatcccagcactttgggaggctgaggcgggcagatcaagaggtcaggagctcgagactatcctggccaacacagtgaaaccccgtttctactaaaaatacaaaaattagctgggtgggggggcgtgcctgtagtcccagccactcaggaggctgaggcaggagaatcacttgaacctgggaggcggaggttttagtgagccaagatcacgcaactgcactccagcctggtgacagagctagactctgtctcaaaaaaaaaaaaagtgattaatttcttacttctcacatatgcagcagtgaaaattcattctttatgcaacaaaactcatcttcagccaaatcttgaataatttactacaactttataaaaagcgtcaaagaaatctgtaaagtaagacctatctgctccacatttttaaaaaagcaattggctgggcgagttggctcatccctataatcccagcactttgggaggccaagagggaggattgcttggacccaggagttcaagactggcctgggcaacagagggagattctgtccccacagaaaattaaaaaaaaaaaatagcaaggtgcaatggcacagtgtctgtcgccccggctactcaggaggctgaggtgggaggatcacttatgctctataggttgaggctacagtgagctatgatcgcaccactgcactccaacctgggtggcagagagagactctgtatctaaaaataaagaaagaaagaaagagagagagagacggaaagaaagaaagaaaagaaaagaaaagaaaaaagaaaagaaaagaaaagaaagcaagcaggctgggcgaggtggctcatgcctgtaatcctagcactttgggaggccaaggcgggcggatcacttgaggtccagagtttgaaaccagcctggccaacatggtgaaaacccacctctactaaaaatat

SEQ ID NO: 671 - DNA, 127 bp, Homo sapiens
tgaggcaggagaatcgcttgaacccgggaggcagaggttgcagtgagccaagatcacgccactgcactccagcctgggcgacagaatgagactccatctcaaaaaaaaaaaaaaaaaaaaaaaaaag

SEQ ID NO: 672 - DNA, 1043 bp, Homo sapiens
gggaatacccaagacccttttgccatccacaaacagtggtaccactgtgctagtagtcattatattcttcaccgtcatgcactaggtttcatttaagaatgtgcatgaagacaccataaaactaatgcttttattaaaacttgaaccatcttaataatattttgtatttgacaaaatgggaagtattaacatacatataaagcagttctgcataccaaagtgcagtgattgtctcaaggaatggtgccttctggattgaaccagagactgcagaatcatgcatgggtaaaagatccattcaaagtgcaaagtaggctgggcatggtggctcacacctgtaatcccagcactttgggagcccaatgcaggtggatcacatgaggtcaggagttcgagaccagcctggccaacatggcaaaactccgtctctactaagaatacaaaaattagccaggtgtggaggcgcatgcctgtggtcccagctactcaggaggctgaggcaggaaaatcgcttgaacctaggaggtggaggttgcagtgagccaagatcatgccactgcactccagcctgggcgacagaacaagactccatctcaaaaaaaaaaaaaaaaaaaacgcaaagtacaaagtagactgatggattttaatgcaataaagtacagaaagttcattgatatagtttcagattccacactggcaaccaacctttaagaaactacctctaccactttgagaaactacttgttggccaggcttagtagctcacacctgtaatcccagcacttcgggagcccaaggtgggtggaccacttgaggtcaggagttcgagaccagcctggccaacctggtgaaaccccgtctctaccaaaaatacaaaaattagctgggcatggtgacgtgtgcctgtaaccccaactactcaagaggctgaagcaggagaattgcttgaacccaggaggtggaggttgcggtgagctgaggtcacatcactgcactccagcctggacaacagagtgagactccatctcaaaaaaaaaaaaaaa

SEQ ID NO: 673 - DNA, 6252 bp, Homo sapiens
cacctgagtcagcaggacctggaatcccagatgagagagcttatctacacgactcagatcttgttgtcacccccattattgacaatccaaaggtgcagaaagcactctgacaagtgagttgtagactttactgagatctgaaatctgcataagattttcattcagaatattatttactgtctaatctttcctgtttctcttgtccgctactctttcatttgtgctgcatgtctgcatttccagctcccgctctgtctgcaaccctttcctctgccttcacttccgcttcactggagttctaagttttcccccctctgttttgaatgagtcagctctgcttctcactactgctttcttccacatgccacggaggggttgccagcctcttgacctcagaccttagctctcagtcccatcgtttctccatctgcactaatgtgaatcactctaagtattctagtctctgatgtgttttgaaggcagaagcagtcagagggcactgctcaccaggctgggctgggcaggcagatcacacggaagccctgccctgtcacaggttgttaatactgcaggggagatggtggggagacactatgggaacttgaggagtcatggttcacaatgtacttctaaaccactgtgagtttttttgcttcttgtcttttggaatataatactttattgctgggggataatgagtatttactttaaaaaacagatgcatttctaagtccctctgttttgtcttgacttccagctccccaacatactcacattccactacttattctctattttaactttactgcttcttttacttttttttagttttacttttattttttatttttttgagacagagtcttgctctgtcacacaggctggagtgcaatgacgcgattttggctcactgcaagctccgcctcccaggttcatgtcattctcctgcctcagcctcccaagtagctgggactacaggtgcccgccaccacgccctgctaattttttgtatttttagtagagacagggtttcaccatgtaagccaggatggtctcgatctcctgaccttgtgatccacccacctcggcctctcaaagtgctgggattacaggcatgagccaccacacctggccttctttttcttttttaaatatctttttctgtattaattcatgactgtttttttcttgtctcattgggaacattagtgtggtttagaacaatgtaagggtttttggattcatgtttattttctagatagacagcattttatatagatgatttagctgtttttcataatggagctaattctttttgtgagttcatatgtctggcagtgtaactttattatgctaagtttgatgtgcattggcgcattttcaaagtgggctttctagaacaatttgtgatatctttcccaggggtgtccagtcttttggcttccctgggccacactggaagaagaattgtcttgggccacacataaaatacactaacaatagctgatgaactaaaaaaccaataaaaaaaaattgcaaaaaaattcttacaatgttttaagagagtttatgaatttgtgttgggccatattcaaagccgtcttgggccgcatccagcccacgggctgcgggttggacaagcttgctttacacaatattctgtgtttccttttttcctcttataaccatatttgatagtttatgggaagccttcatcagtggaaatttttgtgtttaacttttaattctaaactacttttagagaaaagattaaaaaatagttgagaactcctgtatagcttttgcccagctgctcttaatgttcacatcttataggtctatagtatagttagcaaaacctgggaattaacattggtatagtgttagtcaggcgggataatccttacctgtgcctccttttggagggcagcagaatgtggtagttggagttgcatgatacttgattcatatctctgtgtaatgatggcatgcaataccctgactgctcctttcgaattcttcctgaaaagggaaaaataaaacatgagaatagtgctgctaactaccaaatgcatttgaattttaccggttgcctctaatgtcctctttttttttgttccaggatcccacattacagttagttgttatgcctccttagtctcatatagtctgtcctagtttttcacggttttgtcagaatttctcagactttgcttgtctttcatgaccttgacagtttgtcttttattttgttttgttttgttttttgtcacccaggctggagtgtagtggcgcgatctcagctcactgcaacctctgccgaccgggttcaagctattctcctgcctcagcctcatgagtagctaggattacaggcacctgccactgcacctggctaagttttgtagttttagtagagatggggttttaccatgttggccaggctggtcttgaactcctgacctcatgatccacctgcctaggcctcccaaagtgctgggattacaggcgtgagccacggcacctggcctttgtatgtttttgtaatacatgttataaaacgtatgactcaagtccttgacactttgaagagtaactggttgggtgttttgaagaatgtcccttaatttaggtttgtctaagggtttctcatgactcgaatgagattatgaatttggattatgagattagaatgagaatatgcattttagtaagaatactacagtaaatacagtaatgctggttacttaattagtaaaggttttaaaaatattacatatagaagttttgcagaagttaggtatagaaatgatggttgaatttttaattaaaagtctcaagatgcagtatctggctgtcctaagctcatggatccaactacatggtttcttcacatttctcaaataaattatgcactttccaattcatgctattatggcttccttgaatggtgtcttctctgatataatcataaagttctagccatccttcaagaccgcaacccaccttctacctcttccgtaaacccggtgtcaactatatcaagtaaagtgcttgctgtattctctaaactactatttacaaaaaaaattctttctgtccagggttttgtctgtagttatgtcctgcctcttttgaattgtgaaatattttcttgtttatcaaatgtttgtctcatcttcccaaccagaaagtcagctcgctgaaaataggattgtgtcttttatatctttgtatcccccttagcacttgacatagagccttaccttggcaggtaagcaatagatatttgttgaaagactgaatttctaattagacgtaaattacctaaaaagtaagccaggatggggtgaattttttctttgaagctttattttattacagatatcaattgaaatgattttaaaaaataaattattatctatatatgtatgttttaatctgaaaaggcatcgttctttttgtttttggtaacaaattttacacattctttttttgtcctcattgatttattatctgatataagggacatataaggagacagatatccatctttaaaattgcctcaaaagtttttttttttttaaccacagataatgaaacaaccaccatcggttaaatttgatgcaaaaatattgcatctaccagcattttcaggtaggatcataaaggagttatcgaacatgtagactgtctgtatacagatacgaatatgaaatttattcacaaatggaatatttgtatgtgaacaactaaatttattttgtcttgacaattggttatattcttgggtcagtgttatgtgaattgtaaataatctgtaattcatttgtgccagctgttgacatttctcagctgagtctgggctgccctgtcctcttgtgagtggggaggttcctgtagatctgggcaagttttcctgtagagtgggtggggggcctcctcccttccgttcatagagctggttgaatttccaccatttatggcaggtgtaggtgcacagggttggggacaagaaggaaggattgggattctattggcgggaccaggacatttgagaacgggactaggtggttcatgactgtggagatggtgtgggagtggagatacttaagggataattattacatttctgttgagctaatgaaaatcttatttacggtgaaagtcagaaatttttacataccttaaactttttttttttaacaaattatattttaagctgttaaactcaatttggggaaaattattcattgtggctagagtagaatctatgatttgaagtaaatttaaaatatatttaggtttaaataaaccagctaagggtttatatcagtcaacttaattagtgataaaaacaaccaaaaaaacctgtgtagaaggacgtttttgaaagaccaaagtgaagcaaaatattaatagtgctttcagtgccaagtaggtctatttatgcaaacctagagaattattattgggaaatactatttcctttttcttctttgagttacttaggaaattatatttacaatttctttgtctaaagattgagatcagcaaaaacatgttagcaaaaaattttagggagtatcacatttcctagattttgccctttttttatagggattaggaggtaggaatttcaggtgattttagctatcatgttatcctcgttatttttttacagtaatttcattggaactttttaataactgtgtggtttgtgcttttctcaatatctgagagttgatttatttatacaaaggcttttttgtcttttactccagttgtattgaactttgcattttgttataatctaggttgtgagacaattctgctttagacatctgcttggtttgaaagcatagttttccattgaagtgtttaaaaagtttccatggatagataaagagatgaggaatatagaaggacaaatagaagtagtgtcatctttggagtatttttggtgttgacagagtaatgttttctttgtcctcatcttagctgtcgtaactctgtgtttatttctcatgtaatgtttccagcagttgtttttctcatcatcatacgtttgttattttgtttccttggcaatggataagttataatttctgaaagaccaagattggaatgactttttgtaacaagtgtgctcgcagatcgactccagtgagaagagctcggggacctcctgagccaagcttaatctcctttgctgtttgtgagtggtggctggtcaccaggaggtggccaccaggctcctcctttccccgctggtaggcctctgtgacatgacttatgcatttaaatttatgttttttatagaggctcaaacaagtgctaaaatagcaatttgatttaactaccatgaaaaaactgatttatcacgattttaggtttatgcaaattatcctctgcttaatccttacgtcttaaagtagataagagtagacggtgattttgaactttttgttgttgttgttgtttgtaatactcaggtttccattttatgttaacttgtaagatttttaaaaaatatgtgaaatcaggccgggcgtgatatcataagacagaccttttaccttctcatcagtgactggaatgaacgcctgtaatctcagtactttgggaggccgaggcaggtggatcacctgaggtcagcagtttgaaaccagcctggccaacatggcgaaaccccatctctactaaaaatacaaaattagcagggcgtggtggtgcactcctgtaatcctagctacttgggaggctgagacaggagaatcacttgaacccaggagccagaagtcgcagtgagccgtgatcatgccattgcaccccagcctgggcaaaaagagcgaaaccccatctcaaaaaataaaaacaaaaaacaaacaaaaaaaaatgtgatatcataagacagaccttttcccttctcatcagtgactggaattaactgcccatgtggaacgggttgtgggtgttggttcctttactgggtcatctggtaaactgcaaggtttctgctgtgacattgaaggcagacatcaaccctctaagacatttttttcctatcctctgggaatattactttttggacaatcttggtccattggtaagctcatgggaatttgtcagagtttttttgtttcttttggctcatgtttagcatcgattggcagagtgtttggagtcatcctcagaaaggaattacagtggttcggaggtgttttctgtagtgggccctcatttgggaat

SEQ ID NO: 674 - DNA, 6254 bp, Homo sapiens
cacctgagtcagcaggacctggaatcccagatgagagagcttatctacacgactcagatcttgttgtcacccccattattgacaatccaaaggtgcagaaagcactctgacaagtgagttgtagactttactgagatctgaaatctgcataagattttcattcagaatattatttactgtctaatctttcctgtttctcttgtccgcttctctttcatttgtgctgcatgtctgcatttccagctcccgctctgtctgcaaccctttcctctgccttcacttccgcttcactggagttctaagttttcccccctctgttttgaatgagtcagctctgcttctcactactgctttcttccacatgccacggaggggttgccagcctcttgacctcagaccttagctctcagtcccatcgtttctccatctgcactaatgtgaatcactctaagtattctagtctctgatgtgttttgaaggcagaagcagtcagagggcactgctcaccaggctgggctgggcaggcagatcacacggaagccctgccctgtcacaggttgttaatactgcaggggagatggtggggagacactatgggaacttgaggagtcatggttcacaatgtacttctaaaccactgtgagtttttttgcttcttgtcttttggaaatataatactttattgctgggggataatgagtatttactttaaaaaacagatgcattttctaagtcccctctgttttgtcttgacttccagctccccaacatactcacattccactacttattctctattttaactttactgcttcttttacttttttttagttttacttttattttttatttttttgagacagagtcttgctctgtcacacaggctggagtgcaatgacgcgattttggctcactgcaagctccgcctcccaggttcatgtcattctcctgcctcagcctcccaagtagctgggactacaggtgcccgccaccacgccctgctaattttttgtatttttagtagagacagggtttcaccatgtaagccaggatggtctcgatctcctgaccttgtgatccacccacctcggcctctcaaagtgctgggattacaggcatgagccaccacacctggccttctttttcttttttaaatatctttttctgtattaattcatgactgtttttttcttgtctcattgggaacattagtgtggtttagaacaatgtaagggtttttggattcatgtttattttctagatagacagcattttatatagatgatttagctgtttttcataatggagctaattctttttgtgagttcatatgtctggcagtgtaactttattatgctaagtttgatgtgcattggcgcattttcaaaatgggctttctagaacaatttgtgatatctttcccaggggtgtccagtcttttggcttccctgggccacactggaagaagaattgtcttgggcaacacataaaatacactaacaatagctgatgaactaaaaaaccaataaaaaaaattgcaaaaaaattcttacaatgttttaagagagtttatgaatttgtgttgggccatattcaaagctgtcttgggccgcatccagcccacgggctgcgggttggacaagcttgctttacacaatattctgtgtttcgttttttcctcttataaccatatttgatagtttatgggaagccttcatcagtggaaatttttgtgtttaacttttaattctaaactacttttagagaaaagattaaaaaatagttgagaactcctgtatagcttttgcccagctgctcttaatgttcacatcttataggtctatagtatagttagcaaaacctgggaattaacattggtatagtgttagtcaggcgggataatccttacctgttcctccttttggagggcagtagaatgtggtagttggagttgcatgatacttgattgatatctctgtgtaatgatggcatgcaataccctgactgctcctttcgaattcttcctgaaaagggaaaaataaaacatgagaatagtgctgttaactaccaaatgcatttgaattttaccggttgcctctaatgtcctctttttttttgttccaggatcccacattacagttagttgttatgcctccttagtctcatatagtctgtcctagtttttcacggttttgtcagaatttctcagactttgcttgtctttcatgatcttgacagtttgtcttttattttgttttgttttgttttttgtcacccaggctggagtgtagtggcacgatctcagctcactgcaacctctgccgaccgggttcaagctattctcctgcctcagcctcatgagtagctaggattacaggcacctgccactgcacctggctaagttttgtagttttagtagagatggggttttaccatgttggccaggctggtcttgaactcctgacctcatgatccacctgcctaggcctcccaaagtgctgggattacaggcgtgagccacggcacctggcctttgtatgtttttgtaatacatgttataaaacgtatgactcaagtccttgacactttgaagagtaactggttgggtgttttgaagaatgtcccttaatttaggtttgtctaagggtttctcatgactcgaatgagattatgaatttggattatgagattagaatgagaatatgcattttagtaagaatactacagtaaatacagtaatgctggttacttaattagtaaaggttttaaaaatattacatatagaagttttgcagaagttaggtatagaaatgatggttgaatttttaattaaaagtctcaagatgcagtatctggctgtcctaagctcatggatccaactacatggtttcttcacatttctgaaataaattatgcactttccaattcatgctattatggcttccttgaatggtgtcttctctgatataatcataaagttctagccatccttcaagacctcaacccaccttctacctcttccgtaaacccggtgtcaactatatcaagtaaagtgcttgctgtattctctaaactactatttacaaaaaaaattctttctgtccagggttttgtctgtagttatgtcctgcctcttttgaattgtgaaatattttcttgtttatcaaatgtttgtctcatcttcccaaccagaaagtcagctcgctgaaaataggattgtgtcttttatatctttgtatcccccttagcacttgacatagagccttaccttggcaggtaagcaatagatatttgttgaaagactgaatttctaattagaggtaaattacctaaaaagtaagccaggatggggtgaattttttctttgaagctttattttattacagatatcaattgaaatgattttaaaaaataaattattatctatatatgtatgttttaatctgaaaaggcatcgttctttttgtttttggtaacaaattttacacattctttttctgtcctcattgatttattatctgatataagggacatataaggagacagatatccatctttaaaattgcctcaaaagttttttttttttttttaaccacagataatgaaacaaccaccatcggttaaatttgatgcaaaaatattgcatctaccagcattttcaggtaggatcataaaggagttatcgaacatgtagactgtctgtatacagatacgaatatgaaatttattcacaaatggaatatttgtatgtgaacaactaaatttattttgtcttgacaattggttatattcttgggtcagtgttatgtgaattgtaaataatctgtaattcatttgtgccagctgttgacatttctcagctgagtctgggctgccctgtcctcttgtgagtggggaggttcctgtagatctgggcaagttttcctgtagagtgcgtggggggcctcctcccttccgttcatagagctggttgaatttccaccatttatggcaggtgtaggtgcacagggttggggacaacaaggaaggattgggattctattggcgggaccaggacatttgagaacgggactaggtggttcatgactgtggagatggtgtgggagtggagatacttaagggataattattacatttctgttgagctaatgaaaatcttatttacggtgaaagtcagaaatttttacataccttaaactttttttttttaacaaattatattttaagctgttaaactcaatttggggaaaattattcattgtggctagagtagaatctatgatttgaagtaaatttaaaatatatttaggtttaaataaaccagctaagggtttatatcagtcaacttaattagtgataaaaacaaccaaaaaaacctgtgtagaaggacgtttttgaaagaccaaagtgaagcaaaatattaatagtgctttcagtgccaagtaggtctatttatgcaaacctagagaattattattgggaaatactatttcctttttcttctttgagttacttaggaaattatatttacaatttctttgtctaaagattgagatcagcaaaaacatgttagcaaaaaattttagggagtatcacatttcctagattttgccctttttttatagggatttggaggtaggaatttcaggtgattttagctatcatgttatcctcgttatttttttacagtaatttcattggaactttttaataactgtgtggtttgtgcttttctcaatatctgagagttgatttatttatacaaaggcttttttgtcttttactccagttgtattgaactttgcattttgttataatctaggttgtgagacaattctgctttagacatctgcttggtttgaaagcatagttttccattgaagtgtttaaaaagtttccatggatagataaagagatgaggaatataaaaggacaaatagaagtagtgtcatctttggagtatttttggtgttgacagagtaatgttttctttgtcctcatcttagctgtcgtaactctgtgtttatttctcatgtaatgtttccagcagttgtttttctcatcatcatacttttgttattttctttccttggcaatggataagttataatttctgaaagaccaagattggaatgactttttgtaacaagtgtgctcgcagatcgactccagtgagaagagctcggggacctcctgagccaagcttaatctcctttgctgtttgtgagtggtggctggtcaccaggaggtggccaccaggctcctcctttccccgctggtaggcctctgtgacatgacttatgcatttaaatttatgttttttatagaggctcaaacaagtgctaaaatagcaatttgatttaactaccatgaaaaaactgatttatcacgattttaggtttatgcaaattatcctctgcttaatccttacgtcttaaagtagataagagtagacggtgattttgaactttttgttgttgttgttgtttgtaatactcaggtttccattttatgttaacttgtaagatttttaaaaaatatgtgaaatcaggccgggcgtgatatcataagacagaccttttaccttctcatcagtgactggaatgaacgcctgtaatctcagtactttgggaggccgaggcaggtggatcacctgaggtcagcagtttgaaaccagcctggccaacatggcgaaaccccatctctactaaaaatacaaaattagcagggcgtggtggtgcactcctgtaatcctagctacttgggaggctgagacaggagaatcacttgaacccaggagccagaagtcgcagtgagccgtgatcatgccattgcaccccagcgtgggcaaaaagagcgaaactccatctcaaaaaataaaaaccaaaaacaaaaaaaaaacgtgatatcataagacagaccttttcccttctcatcagtgactggaattaactgcccatgtggaatgggttgtgggtgttggttcctttactgggtcatctggtaaactgcaaggtttctgctgtgacattgaaggcagacatcaaccctgtaagacatttttttcctatcctctgggaatattactttttggacaatcttggtccattggtaagctcatgggaatttgtcagagtttttttgtttcttttggctcatgtttagcatcgattggcagagtgtttggagtcatcctcagaaaggaattacagtggttcggaggtgttttctgtagtgggccctcatttgggaat

SEQ ID NO: 675 - DNA, 685 bp, Homo sapiens
agaaaatgtttaataataagggtaattcttattatacgtcttctaatgttactctcgcaaagtaaaatctggtaatagaaagtaggatttttaggtaatggttgagcatttaatactttgagaaggcttatggtatgctcattaaaaatgaatcaatgaaatatgtatttaaacacttttatttaaaacgtgttatatacctgaatggggtgctccctgctgacattttcagacagacattccaaatcatttccgagaacagtcatccctctgtatcagccaggagaatggttctagtatccccttggatactaaaattaacacatactgttttttcccccactgttaaaaattgaggtttgattgtaaaacagttttaatttgaataaaatgatactgaggtagacaagttctctggtaggaatcttcttttattctctttctccatccaaagccacttccagcgaggttttctctgacctcaggttatattaccttgatagcatatgataaagggtccttaacttagtctgggagataattattattgaagtagatacttagttttgttttgcttataaaaaattagaatcacatgatatagttttttatgtttgttttcccccataacatatatattatgtattttaaatgttatcaacattttaaaataaaatacataata

SEQ ID NO: 676 - DNA, 190 bp, Homo sapiens
taaaatacttcaaccctgatccctgtgtattaatttagttatacttcctcaaagtttcccttgggcacccttatctgtccctatgtagcacatagcttccctatgatgttatttataatctaatgagattaattatgatttataaactcccgatggaaggaagtgtccttactttttatagaagcaacat

SEQ ID NO: 677 - DNA, 655 bp, Homo sapiens
ggaatttctaagtgaatgaaggaacacaggtttcacccttgcagtcagtggaaaaagttggtgagggactgaatccttgttctgttgtttatccatgaagcctatatatttctagtgcaaaaggcccagtgggtctcaaaacattcttggaggggtttgacacactgctattagtagtgactcataattccacgattccctgggatacagagaaggcaggggggtagtactgtttgaacaaaaatcttcccaagaccctggcaaagagatcttccttaggaatcagtggcatatgcgtttatgttctttaacagggaaagtaaaagtgagcgcacttttttgaagctcataaatactcatgtgactgtaaatttagaaatgttaattaattgggcctaatgtttgatctggaaaagtacttagcagtcaccaggaatttgccttgaactgactcgaaccacaaatcagaaccgtatttccacaatttaatttttccatgagacaatcataaaaactctgctgggattatattactaaaacctttatatcccattgcattggatatgtttgtaggtgagtaatgttaaatttaaaaaaaaaaattaataaagcatttgtttaggacctctgtatgcttgataaagtaaaaaaaaaa

SEQ ID NO: 678 - DNA, 1798 bp, Homo sapiens
atgaaaagaaacaacaacaaaaaaatcacaccaaggctagaaagatgcatatcagtatctttgctcttttgccttttatgagcaattagagtaaaccataatcatacctcctaaatgagtttctgagtgttaatattagtgctgtactcaaaggaatgtccatgttccacatggaaagtgttaaattactgagattagtgatttgtgtgtatatccatctgttgactgaccatctgtatgtgtgtcactgactgttgcgaggcttctgtgttccttagcagtgcctccaggtcaccataggacatttaattattgcatgacttaaaagattcaatacggcaaccacagcaaagagaaaattctagttctgccactaacacttcctttaacacaactctgctcaaacatgtgcctttcattgcattccaaagttatcgataattaccagctatcattgttttgggtgttttctctgctaatttctattggcatgcattctagatagttgcccattgtaactataaattgactatttaaataaacaaaagcataattcatggaaaactgccattctaaggtatgatgcaagatggtagatattctgcttccttttccatattctatcatagagatgcattactataaatcaggacttggtatatccatttgttacatattttcttaatgtgggagtcaaagtgaagctacatagctaacaagtcttattcatttagtaagttggctgccctctgctgttcataatgtttcttaaacagattcgtttcctctaagagaagtttctatctccccttggcaaaacaaaatactattcttgaaaacagaagttataataattaatgatatcattcagtgtgtaacattagaaactatgaagtttaaaagagtcagaggttagttttcctgtagaagaaatagtatgtctctctaaacagaagagaaattactggaaattctctctcctgtcagttaccctaaaaaccagctccagcaaagccatttcacgaacaattatgcatctataatgatctaaataataattggagaaaaatagtattttatggacattaaaatctcaattaatactattgcaactattgaatcaaatataaattgaattaaatttttaaattcaacagaaaatagcaaattggttactagaatattttgtctctaccaatttcactattacttctgaggtgtaaaccaaatataatactggcataaagaaggaaaaatatctcaagatttctaggcattttcctatgtctaatagtaggatgttctctctgaatttatttattacaaaaataacattacaacaataaagcaaaataatatttaaaagaaagaaaaaacaaacagtcgcaataccagaacaccattgtagtcgtttgtgtatgtgtgacttctttactgtgttcatgcagagacaagctttgtaatacctttgtaactactgtacaggtgcgtggttagattccgttttgactgcttggtatctcattgtaagcatttcccagggacactacacagtctttataattatgatcactacatcttttggataacttaggcttttgcactattttgtcacgatgcctcaaacttttctatcattgtctgtaattactcctataatcttttattataaaatattgaaacaaagtcacatcactaaaaacactgtgagtataatttattagtaagtgtagactgtgtatcattagcaaaacttgtaaatgcaacgagtcaataaaacagtagaacaatgtcaaaa

SEQ ID NO: 679 - DNA, 513 bp, Homo sapiens
cgatggccagcgctgaggggtatcaaggtcttattcatgcattctcatgtcttttgactccaagatgccttggaagcattcctttgctcttttcattttcaatttttgaaaaatatacacaacacctgggcaattctgtgttgctcttttgaatctctacatggcctctccatctgcccacttttccaaagggtcatcttgggttttcccctctcctgcagtggactcagtgtcgcctgccaggagaagtgccactgctgctcctctcttctggcccacaattgtccgtgcctgggctacagtgacagccacctgattcatttccctacctctccagtctagtctccacaccacagcgaaggcaatctttagaaaatctttataaaacctccagctcaaaattttctctggctcttcactgtccttcgagcaaaatctgaaaccctgagcataatttatagaagacctgtgactgggctccagctgacctctccagcctcatctctcctccca

SEQ ID NO: 680 - DNA, 11538 bp, Homo sapiens
ggggaaaaccggctgtggagaaggaaatagggcccggcgctgagtgagcgtggttgcgtgtcctttgcagacactttctggggcgaggtgacatggcgagagtcttggatcggtggacgtagacggtagacagttcgcgtgcgtttccttcgcctacttggcctacatgccttctgcccgtgaagcgatgtttcccctcgaaaggccgtaggctacgccgtcagaatcggtttttcagtgagttttgacccctccgacgctccgtcgcctgacagaatcgcggcgttcttcgtacccgcccatcctccgcggacgcccgctgccatggcgactctgctgcgccctgtcctccgtcggctctgcgggctcccgggcctacagcggcctgcggcaggcaagtggcgccgggttctgggcgcaggcgggaaggagcctgagggcgcccggctcctctgacctcggcctttttcttgccccgcagaaatgcccctccgggctaggagcgacggcgccggcccgctatactcgcaccacctccccacctccccgctgcagaaagcgctgttggccgccggctccgcggcgatggcgctctataacccctaccgccacggtaaggccgcccgcgcctcgcccccgtgggggcggcttggagccgtttcctgtgggtaactggaacatagcctaggtcggggtacccaaacctggttgcagctcgtaaccactcggaacgtttatgaaaatgcagattcctggatcccacctaaacgcactgaatctgaatctgaatctgcagtggagggagaaatgggcgtgaaaccgaaagtctgtctttaaactacttgggagaatctgtcatgcagccatattgagaacatctagactaaatagatgattcataagtaccgatcagtttataatatcctactagaaagtcaactccgaggtcgaggaccatgtctgcctcgttccactgcatctgcagccttctggatagtgcctggcacatagtaaatgctcaataaatgtttgctggatgtgtgactagaacattctagggttctacagtgtttttcttatgcctcctagatttttgagttctgggaagtactgttattcctactaacaaaaacaggctaggcgctattatagtggctcacgcctataatccctatcggggggccgaagcgggcagatggcttgagctgaggagtttgaaaccagcctgggcaacacggtgaatccccatctctacaaaaaaaaatacaagaattaattggggctggttgcatgcggctgtattcccaggctgaggtggaaggaccatttgagccggggagttcgagactgcagtaagttgtgattgcgccattgcactccagcctgggcgacagagcgagaccctgtcttaaacaaaaaatacactatatctccatgtccccagtggttttttgtttgttttgttttgagacacagtattgctctgtggcccacgctggagtgcagtggcgcaatctcagctctatgcaacttccacctcccaggttcaagcgattctcgtgcctcagcctcctgagtagctgggattacaggcctgtgcggcctggctaattgttgtatttttagtagagacgggattttgctatgttgcccaggctggtctcaaactcctgacttcaggtgatcctcccacctcggcctcccaaagtgttgggattacaggcatgagccaccacgcccggccaagaccagcgaattttttaatttttttgtagagacggcgtcttgccacgttgcccaggctgctctggaactcttggcctcaagtgatcctcctgcctcagccccccagtgttgagattacaggtgtcagccgctacacttggccactaagtgttatatatatatgattttcatggtttctcacattaaccagctaagaaaggtgttgtctgcacttcacaaattaagacactgaggctgaaaaatgtgaagcaggccaggcatggtggctcacacctgtaatcccagcaatttgggaatccaaggtgggaggatcacttggggccaaagttcaagaccagcctgggcaacatagcaagacctcatctctacagaaaatttaaaaaactagctgcatgcctgtagtcctagcagtgagctatgatcacaccacttcactccagcctgggcaacagagcaagaccctgtctcaaaaaaacaaaacaaaacagaaatgtgaagcaatttgtactaggtcacctagatagtgaacacacctggactgtagcccagcatctctgatgcctaagcctctaccaatcaatggagacatgatattgtattgtgaaaagtgatttataaaatctttacaacgttgtgctaactagagctgtcccgccccagtagattaagaataagaactatagatatgtatactgatcccttgttgtgtgctgggtaatttgctaagtgtttagcctgaatccttataacaaagagctagacatcatccctaatttatcctgtaggaaacaaaggctcagaccaggtcagctaacttacctaagatgacatcccccatttgtgcccgtttctgtcctttcagacatggtcgcagttctaggggagaccacaggacaccgcaccctgaaggtcctcagggaccagatgaggagggatccagagggtgcccagatcctgcagtaggtcccagctctgcctgggggtctgggggcattctctaggtattctgacctctctagaatcacattgtgtttgttctgttccgctagggagcttttgataccctggctacatatggttgcacaggctgggcactgcccaattccaggggtgtcattcacatacatgtgtatacactgatgacttccgagttgtgcagtgtgatagccttggcccagtttcaaccacagggctctgtgccttcattaagttcccataacatgtgctggctttacccctcccttgcagtaccttttgcaagtactctggtcacattcgaggactgtcttcctgccgagattgtacccctgcccatgtccttggtttggggtagtatcctaagtccctgacactagcctggccagttgtaggtgctccattaaggcttgtggtggccacattgctcctctgtacattctcccgcccctcagctcgctgtagttggatcgttcacctacctttgcccacaccctcccaatgcccaagtcttgcctttcagggagcgtccccggatttcgacatccaccctcgacctgggcaagctccagagcctgccggaaggctccctcggtcgcgagtatctccgtttcctggatgtgaacgtgagttttcagctcctgtgtatctggcagtcaccagacaggacagaggaatagcacaggcatgacaccctgaggaaagaggagccctgagctgccaccattggcaggagtgctcttcaggctcatgccaaggctttgtcattttctatgggataggcaaatgggtgggaacatgcctgcaattgataatactggccagtgttcattaacctcgcactgcatgcctgatgccagcctcatccgtgatcttgctgaatccccccacaactctgtcaagtatgttctattattatcctcttttagtagataaggaaacagaggctcagagcagtgaagcaaacttgctaattccacataactggtattaatggagatagtaatcaatcccagatcatgctcttcactgctgtactgtatccctttattccagggacattgctttccctacggtatggcaggtgtggcactctccagcccctccagccccaggcagggaggacaaggagagggggaaagggggtgtcccgactattggcaaactcattcactaactgaggctctgctatgtgccatccctttttttttttgagtcgctctgtcgcccaggctagagtgcagtggtgcgatctctgctcactgcaagctccgcctcccaggtacacgccattctcctgcctcagcctcccgagtagctgggactacaggcgcccgccacgacgcccggctaattttttgtattttttagtagagacggggtttcaccgtgctagccaggatggtctcgatctcctgaccacgtgatccgcccgcatcagcctcccaaagtgctgggattacaggcgtgagccacagcgcccggcccatcctttttgttttgttttgttttgagacagggtcccgctctgccacccaggctggagtgcagtggcgccgtctcggctcactgcaactcagcttcctgggttcaagcgattctcctgcctcaaccccccacgtagctgggactacaggtgcacaccacaacgcccagctaatttttgtacttttagtagagaggggttttaccatattaaccaggctggtcttgaactcctgacctcaagtgatccacctgcctcagcctcccaaaatgctgggactacaggtgtgagccaccgtgcccagcccaaccattgttttgtgtacaggggatataatggtgaactagacagccaagttccctgccctcatttctattctacttcgagaggtagacaataaaatagtttttaaaaattttcagggaaggcacagtggctcacatctgtaatcccagcactttgggaggctggcgggaggaccacctaaggtcaggagtttgagaccagtctgaccaacatggtggaaacctgtctctactaaaaatacaaaaattagctaggtgtgatggtgtgcgcctgtaatcccagctactcgggaggctgaggcaggagaattgattgaacccgggaggcacaggttgcagtgagctgagatcacaccactgcactccagcctgggcgacagagtgagactctgtctccaacaaaacaaaacaaaaaaattcatataaaaatacaggtaaaatgtttcaagtaattagaatattctggcactggtccatgcgtgttggctcatgcctgtaatcctaatactttggggggctgaagtgggcggatcacttgagcccaggagtttgagaccagcctggacaacatggtgaaaccctgtctctgcaaaaaatgcaaaaattagccaagtgtggtggtgtatacccatagtcccagctacctgggagggagtttgaggtaggaggatcagttgagcccaggaggtcgagggcggtgagccgtaatcacaccactacactccagcttggacaacagagcaagactctgtctcaaaaataaaaaaaagtataccagcactattgtcagcagttgggatacagtggacaaaaccagcaaaaagcctgcctttgtggaacttacattctagcagctatgaagagaacaagttagtgtgatagaagacagctttggtattgggaagggtacagccacttctgactgggtggtcagggccggctcctctgaggagacttggaaggtaaggaggagccaaccctgtggagagctgaggaggagcattctgagtagagggaatggcaagggcaaaggccccttgtgtttaggaaaaggaaggttgaccagtgtggccgcagaggagggagtagcagggagacagtgagtgggctggaaggggagccagggctgcgccctgtaggccaccagaaggaggagtctgtattttgtaataggagcagtaggaaacttgtggaaggttttgagcaggacagtaaagtgacctgatttgtaaaggaccttaggatccagttggcccatcttccctgtccctgtcccatcttccctccctcctgcaacacagatacatcccatcaaggcacccctgccaaatggcgagccagtctggctgatggaggtgaggggtctccaaaggttgccctagaacagtttctcaagccgggcatgttaatgtttaggctggatcactctttgttgtgggggcggtcctgagcctggtaggatgtttagtggcatccctggcttctacccactggatgccaggagcacccccccgtcaagttgtgacaaccacagatgtctccagagattacagatgttccctggtgggcagttgagaaccactgctctgaatggttattgtccccgagacgatgttctgttcctcacagtctcctgcacagctaccttgacggggcgatcacctgcactattttaaaccatctctctcagatttcaccaggatgcaagtcatttcatcagtgggaaactcaccagggtgacctgcctcaagtgctacacagggagggacagtctgaatttcccccagtctttagccctgtcgctgtggaggggagggggtagcagggacaggactgctaggacaccttgctcagccacagccccacttgtaaccgcgctggcgattgtgacacttgtagagcaaggaaatcagcagctcatggaatgtgaaggagcacctttgtccccagagagatttagataaaggttcaaggtgaggctaccctcccctccctgaggctgattttggtgagaggtgtggtcatcttgtagtatcaagactacaggcatgggcttgagaattaggaggagcctgagtgagaatcctggctctcttcccagctttacaagcctggacaaatcctttgacctcgctgagtctcaggttcctcatcagaagtaagaggacctcccatatatcttccagggcacttatcggccttggtaatggatattaaggccactggctttggaatccagcagactttgtttcaaatgctgactcggccactttactagctgtgtgatcttgggcaaattactttatctctctgagccttgttttccttatttttatttatttatttatttttttgagtctcgctctgtcacccaggctggagggcagtggcacaatcttggctcactgcaacctccacctcctggcaattctcctgcctcagcctcctgagtagctgggactacaggcgcacgccaccaggcctggctattttttgtatttttagtataggcgggatttcatcatattggccaggctggtctcaaactcctgacctcaagtgatccgctggccttggcctcccaaagtgttgggattacaggcatgagccaccacgcccggcccttgttttccttatctatatctgcagtaataacagtatttacctccaagattgcaaggatgaaaggataatatatgtaaaagacaccctaggtgccggcacctggtggatactctatgatcaccttcagcttcacacagcaggctaaggccattctttgggaacaggaagaccaggctgttcccactgtgtatgggtgctgctgagtactcagaggcagtgggcagttaagaggagaagagttctgggatcagaaaagtgcccaggactggccttttattcatatgttcaagaggtgttcattcatccaggccctggatcaggctactggaggtaaaagaataagtgaaacagagccagtcctgcccttgtgtagcagacaggctgtctggatactgtccataaaaataaaatgtgatcggctgggcacggtggctcacaactgtaatcccagctctctgggaggcccaggcgggtggatcacgaagtcaggagtttgagaccagcctgaccaacatggtgaaaccctgtctctactaaaaaaaaaaaaaaaaattagccgggtgtagtggcacgtgcctgtaatcctagctactcaggaagctgaggcagaagaattgcttgaatccgggaggaggagattgcagtaagccgagattgcaccacggcactccaacctgggcgacagagtgagactccatctcaaaaaataaaaataaaaataaataaataaaatgtgagcacgtaggtaatttttaattttctgccagctactttaatagcaaaaagaaattaatttttttgctattaaaattaaggtggaatttttttgtttgtttttttgagatagagtctcactctgttgcccaggctggagtgcaatggtgccatctcagctcactgcaacctctgccttctgggatcaagcaattctcttgtctcagcctcccaagtagctgggattacaggcacccgccaccatgcctggctaatttttgaccatattggtcaggctggccttgagctcctcaggtgatccgcccgcctcggcctcccaaagtgctgggattgtaaccatgagtcaccgtgcctggctagaattgattttaaatatgcatcttgtttagcccaatatatccaaagtattatttcaacaagtaatcaattttctttttttttttttttttgagacgaagtctcactctgtagcccaggctggagtgcagtggcgcgatctcggctcgctgcaagctccgcctcccgggcttacgccattctcctgcctcagcctcccgagtagctgggactacaggcgcccgccgccacgcccggagaattttttgtatttttagtagagacggagtttcaccgtgttagccaggatggtcttgatctcctgacctcatgatccacctgcctcagcctcccaaagtgctaggattacaggcgtgagccaccgcgcccggccagtatttttaaatcattgagagttttacatttttttcatactaagcatttgaagtctcgtgtgtattttatatgatcagcacatctcgcttggacaactttcttggccacatgtggcaagcggctgccatactggacagtgtaggtctaggagacattaatactcacatccactaaacatcaaggtacagttattttgagtgccactaagaggtgaatgatgtttccagagaccataacatgaacccacttggtctgtaggttaggggtggcctctctgtggtggggggaagggatgggggacaggggacacttaacccaggtcatgaaggataagtaggagttaccacagtgaagatggaggtagtgggagagaacaccccaagctgggagcaagttatgctaggatcagggtctttggggcttcattatttatttttagagacaatgtcttgcttgagtgcagtggtatagtcatagctccctgtaacctcaaactcctgggctcaagcatcctcctgtcccaagcctcctgagtagctgggactataggcacacaccaccacacctgactaatttttgtattttttttgttctgggttttttttttctttgagacagagtctctgtcacccaggcaggagtgcagtggtgcaatcttggctcactgcaacctccgcctcctgggttcaagtgattctcctgtctcagcctcccgagtagctgggactacaggtgtgcaccaccacacccggctaatttttgtattttttagtagagacagggtttcaccgtattggtcaggctggtgttgaactcctgatctcaggtgatccgcccaccttagcctcccaaagtgctgggatttacaggcatgagcctcggcccctggccagtcgccagagttttctagtaggtatgagttaggtgagagttgtgacggtgtcagagacagactggcaaatcgggccctgggaaccatcaggaagggttctaggggaggctcatggttgtcagagggtctccccagacacccgagcacccacccgcttcgtggatgatgaggagctagcgtatgtgattcagcggtaccgggaggtgcacgacatgcttcacaccctgctggggatgcccaccaacatcctgggtgagtgcccccaaccctgatggcctgtctccctggggtggcttcagggccagggcagggcttgcctatctccaccaccctctgcatcacctggcttggtgcctcaatttctgctttacctgaacatcttagtagcatctttgccacatgtcccccttctttctcccactgcccctcagggctcctgcactaatggagcagcagagcccatcttcaaggctcctggtgtctttttaggctttagctgcctccctgctctgaaacctcagtagctccctaaggcctgcaggaaccatcctggagtgtttagcctggcttatggggtcatggggtcctctgcgccctgaccccaggcttcctttccatcccctactcccttctgttcactcttgggctctctcctgtactccaagccaagtgccccagggcccagcacaggccaggactgggcacagctgaccccgtagagattagggaggaacagtgcctctctttaccctgctgtgagcaccactggcctttccttcagatagcttgttcacctcccaacacatccctcacccacaggggagatcgtggtgaaatggtttgaggctgtccagactggcctgcccatgtgcatcctgggtgcattctttggaccgatccgacttggcgctcagtaagttttcaagtggtagctgggtcggggttgagggtggtatcaggacagaactcagagggaccagggctcttagaagtaggaagagcacacgggcccctgcacagcccgttccagttctccaggaagtaagggtagaaagaatggagcagagatgtgaaactggcctggggcaagggtcttcaagtgagcaaataaagcctgtacatttcacaggactctggggtctcttgggccaggcctaagtgcatggtcagaatgatgagcgtcagtgggaaggcaggttggtgttagattctggagtgagggagccatgatttaaatctgagcttcgacatgttcaagatgtgtggctttgggcttgagattccacctcactgagctctgttgcctcatctaaaaagcagggataataactacctccttccgaggcctttgtgaggatgaactgagaaaatgcacaagtgccgagcagtcgagtgcctggccccagggacttgatgttttctttttcctctgctgccccacaggagcctgcaagtgctggtctcggagttgatcccatgggccgttcagaacgggcgcagagccccatgtgtcctcaacctgtactatgagcggcgctgggagcagtccctgagggctctgcgggaggagctgggcattacagcaccacccatgcacgtccagggcttggcctgagctcctgagccagcggggcctggcctacctcccccatcccctgcttcccttggaggcagagggctcccttgactacctttgttcctcttctttgaacactgacccttggacaacatttatcataatttgtcataaccactgctgagtggccttgaggacgaaccccgcagggagcaagcagtacagtggcattcccagggggaccagcagctacccaaggagaaccatgcatgaacagtatcagtcgtctgggctcatgctgggatgtcgcagtgctcctgttgcaactcctcccagccagccaggtttgctgggggccaggctgggtgtcctcacaggagtgagggctacacccaattccaaaagcctgagaagagagaagtggagggggaggcgagtgtgtgaataaaggctcccatcaggtcaa

SEQ ID NO: 681 - DNA, 17792 bp, Homo sapiens
agcttttgttttgtttttatggtttttatgtgggtgtgataaaatgtgcataatgtaaaatttatcattttagccttttttttttaagagttgagggtcttaattagccaggtgtcacggtgtgcatctgtagtctcagctacttgggaggctgaggtgggagaatcacttgagcctgggaggcagaggttgcagtgagctaagattgcgccactacactccagcctaggtgacaaagtgagactctgtctcaaaaaaaaaaaaaaattacgtacatacttatatataaaatgaatcagctcccaagcctctgcttcactgaccagccagatctcctccctgtgctcatcactccattattttcttgcctgatccccctacgtcataatctctgtgagacctagagcctcatctgtccttgagtaccaagtcccagcacccagagcagtggctggcctacaggagcacgcgattaacacacgtgggtgggatgaaagacaatgagcaagtgagtgtcgttttaatccccattttatagataggtgacagcttcagaggccacattacccagtcagtaaacacagtaagctgaggttccacccaggccctttggctgtgaaagccaagatgagtagcctgggggccacgcccctcccccaggtgcccagttcatacaggcaggcaattggcagacgtgggggcctgtggatttgtcagcaaggttgctggtggggtttttgtttgtttgttttgagatagggtctcaccctgtcacccaggctagagtacagtcgtgtgatttcagctcactgcaacctccacctcctgggttcaaatgattctcccacctcagcccagatctggagtagctgtagctggactacagacaagcgccaccatgcccggctaatttttgtatttttggtagagacagggtttcaccatattggccaggctggtctcgaactcctgacctcaagtgattcacctgctttggcttcccaaagtgcagggattacaggcgtgagccaccacgctcagcctgctgggtggctttttctttttttctgacatagggtctcgctctgttgcccaggctggagtacagatctccatttactgccgccttgacttgctaggttcaagcgatcctcccatctcagcctccctagtagctgggactacaggcacacaccaacacccccggcttttttgtttgtttgtttgttttttgtagagacagggtctccttgtgttgcccaggctggtctcaaacttctgggctcaagcaatcctcctgtgtggggatcgcaaagtgctgggattacaggcatgagccgccacacccagcagaattttaatttaaaagctcagcttaaacacctcatgatgcttacacatttggtacatttttaacaatcgttgattgttcaactccatccgtctcagagttaaagacacaggataaggaaaacatctccttatccaagtgatttggggtggtattcccagctgtctgaggctgtacattgaccaattattttggccatgactcagagttcccctatcctgctatcctgagatcatgagaggccatcacagagtccacttttatcatctctatgccaataagggctctaaatggggtggtgtgacagcccatgtgccctacgttcaagttacctaatttttccaaagaactgagttttgctgataccctccactcccacccagctttcctcaccatttcattggattctgcttgtctaaatattgctgattttgttctgatttttctcttttttttttttttttgagacagagtctcactctgtcacctaggctggagtgcagtggcgcaatctccactcactgcaagctccgcctcccgagttccagttattctgcatcagcctcccgggtagccaggactacaggcacgtgcaagcacgcccggctaattttgtatttttagtagagacaggtttcaccatgttggtcaggctggtcttgaactcctgacctcgtgatccgcccaccctggcctcccaaagtgctgggattacaggcgtgagccaccgtgcccagcctttttttttttcttttctgagacagagtctcactctctcgtccagactggagtgcaggggcacaatctcagctaatggcaatctccacctcctgggcttcagcgattcttgtgcctcagcctcccaagtagctaggattacagaagtgcgtcaccatagctggctaatttttgtatttttagtagagacagggtttcactatgttggccaggctggtcttgaactcctgatctcaggtgggccaggtatggtggctcacgcctgtaatcccagcactttgggaggctgaagcgggcagatcacctgaggtcaggactttgagaccagcatgtccaacatggtgaaaccccgtctctactaaaaatacaaaagttagctgggcgtggtggtgaacgcctataatcccagctacttgggtggctgaggcaggagaatcacttgaccctgggaggcggaggttgcagtgagccaagattgtgccattgcactccagcctgggtgacagagcaagactccatctcaaaaaaaaataataaaattagctggaaaaaaatatttagccaggcatcgtggtgcacgcctgtagtcccagctattctggagggtgaggtgggaagatggttgagcctgggaggatgacggtgcagtgagtcatgtttgcaccattgcactccagcctgggtgacagagcaagactctgtctaaaaaaaacaggccggaaacagtggctcatgcctatattcccagtactttggaaggccgaggtaggcggatcacctcaggtcaggagttccagaccagcctggccaacatagtgaaaccctgtctctactaaaaatacaaaaattagccaggcttggtggtgcacaccggtaatcccagcaactctggagactaaggcaggaagaatcgcttgacccaggagggtcgaggctgcaatgagttgaaaccgcgccactgcactctagcctgggcgacagtgcgaggccctgtctcaaaaataaaataaaataaataaattagccagatactgtgtgcacgcctgcagtcccagctattctggaagctgaggtgggaagatggttaagcctgagaggacaaagctgcagtgagtcatgtttgcatcactgcactccagcctgggtgacagagcaagaccctgtctaaaaaacaaaaacaggccgggtgtggtggctcatgcctgccatcccagtgctttgggaggcagaggttggcataatcccagcgctctgggaggctgaggtgggcggatcacctgaggtcaggagttccagaccagcctggccaacatggtgaaaccctgtctctactaaaaatacaaaaattagccaggcatggtggtacacatctgtaatcccagctacttgagaagctgaggcaggagaatcgcttgaacctgggaggcagaggttgcagtgagctgagattgtgccactgcactccaacctggatgacggagtgagactccgtctcagaaaaaaaaaaaaccaaaacaggccgggtgtggtggctcacggctgtaatcccagtactttgggaggccaagccaggcggatcacgaggtcaggagattgagaccatcctggctaacacggtgcaacaccgtctctactaaaaatacaaaaaaattagctgggcgtggtggtgggcacctgtagtcccagctactcgggaggctgaggcaggagaatggcgtgaacctgggaagcggaggttgcagtgagcctagatcgcaccactgcactccagcctgggccacaaagcaagtctcaaaaacaaaaacaaaaacaaaaaaatgattaacatttcaatcagtcaatgggtagactttgagtcacgctgattatccaccacaattgtgggcggagctcattcaataaactgaagacctttaagagaaaagactgaggtcccggccaggtgcggtggctcacgcctgtaatcccagcactttgggaggctgagccaggccaacatggtgaaacctcatctcggatacaaaaaattagccaggtgtggtggcgggcgcctgtgaccccagctacttgggaggctgaggcaggagaatcacttgaacctgggaggcggaggctgcagtgagcaaagatggcgccactgcactccagcctgggcaacaacagaaaaacaacaaaaatcatctcattttcatctgtgtcttccagtattaaagaggttgagtgtcatttctggcttactagccatttggatttcttctgatacacacttcatctcatttgcctaattttgtcgttgtcttcttattgctttctaagggctctctgtatactatggatattagtccttggttaatgacactgcaaatacttacaattttttttaatttttaattttcgtgggcacatagtttattgagaatttttttttttttgagatggcaggggtctcatatgttccccagactagagtgcagtggctattcacaggcgccgtctagcgcactacaaccttaaactcctgggctcaagcaattctcctgcctcagccttgggagtagctgggattacaagtgcccgccaccacgcctggtctgccaatactttctatcagtctgtcatgtttactgtcttttcctccatacagaagtttttccttctcagttgggtcaagtccattgacctttctgttacagcttgagttttgtgtcttacgtagaaaaggtgcccctgctctcactttctgcacagctatcaggtccagctcatagcagttcttctatttatccatccactgccccaggagctgcctgggcattcactgccccgcacccctctccagccccaaggtagagctcgggccctgggagtcccaggaccatcccggactggggagctgcttggtgtccagccccgggctcaagctcttctccagctctgcagctacctgaggggtagcagcccggatagcatcctggatgttggttaggtcccactgggtcctcaggagggcactgtctagcgtgaagaagccgtcgcgcgtgcgccgcacttgggtgcagacagcagtggtctttagttccaggccgatttcatgaaccaacttccgcagctctttctgcgtctcatgcatgcactgcacctctgccagggacacacaatgacagacatggtggtgagagcacagcctctagtgtgtggttgtgaacgcacaccccttggatacctcctaggtgtgtaacaaccttagcaagacccctaagctctccaggttgtgctattcagaggacctgccctgtgggtgccacctgaaatgtgttaagacttgcagaacctcaggccccaccgggacctgccaagtcagaatctgcccttttttggcaacagggtctcattccatcacccaggctggagtgcagtggtgtgataacagatcactgcagccttgacctcctaggctcacatgatccacctgcctcagcctccggagtagctgggacgttctgagccatcacaactggctaattttttattttttgtagagacagggtctcgccatcttgcccaggttagaacctgccttttactaagactcggtttccctatctgtaaaatgggagttatgaggagtaaaagaaatcatttatagaaagataaatgattatctttaaaatgttattaagatgttatcttaataacagagttctgtgctcaagcagaggagcaggcattaacatgaccaacagaaaaaaggggcgggcgcaggcagagacaaaaggaacacagataagaggggcctgagctgggtgggactggggacgtaagagttgtgtctgatggagccctcacagcttcaaacatgggcagctctggaaataagccactaaatataacctttgcttggtaaggtctggcttccaagggtgacttggcaagagataggagagcttttgttctgcgagctctgtcatcagccaagtccaggccagggctgggaaggaagtcggcacctgatgccttggcccgcagagatcagggccggcgtgtgctggcctcagctgagccagacaacagtgacctctgcaagagcgttcctgagtgactcccaaacctacgggtcccatctcactgctccaacttccttggccaacctacctaagaggaattccggaggtgcaaagtagaggcatcggatgccagttatcagcatcggggacttgttcatgggccggatcaggcctctcacggccatctcataggcctcctgggtcttcaggtcgaggttggagtacctgcagatcaggaagggggctgcagctgggtggcccacctaccctttcccccacatgaggtgcctctctggaagctcctcacttgctttgtgtgccctgccaccgtggctcctccagccacctttcctgccctccttcatcaccaggtgcctggtagagtcaggaaacccaggcaagctggctccagagcccaagctcttaactccttggctgctcttgcccttgggctctgtgctccaatgatgtggtccctggtttccttgccattagatcatatactctcagcaggacagcttggttctcttgctcttcttggcctcccgttggccaacccaagacctggcacacagaaccatttcttaatgccaagaaagaaacaggtagctcccgtctggttctgggctctaaaaacaagatccatggaatctgccccaggtttgggggagcctacgggagccaagggcacttactgctctcccagtacctccctgagggccctactcacatcaccagggccttctgatgggagccttggataacggccagaatgcggtccagcttctctctggtcacgtggtctggaaaaggcagggggttgtcaatgtacaggtacctgctgagtattggtcacagcaaactccttccccccaggccagccccatccctggaacatggagagaggatgttttggagggatccccatggcggggtggttgggagtcctttgagattctcatgaaagcactggacctcagaaagatactggatctcagaaagatacacatgactcagcagcaagggcactctattttttttttttttttttttttgagacggagtctcgctctgtcacccagactggagtgcagtggcgcaatcttggctcactgcaagctccgcctcccaggttcatgccattctcctgcctcagcctctcgagtagctgggactacaggcgcccaccaccacgtccggctaattttttaaatttttagtagcaagggggtttcaccgtgttagccaggatggtctcaatctcctgacctcgtgatccgcccgcctcggcctcccaaagtgctgagattacaggtgtgagccactgcacccagacttttttttttttttttttttgagacggagtcttgttctgttgcccaggctggagtgcaaatggcacaatctcagctcactacaagctccgcctcctggagtcaagcaattctcctgcctcagcctcctgaaaagctaggattaaaggtacacgccaagacacccggctagtttttgtatttttagtagagacggggtttcaccatgttggccaggctggtctcgaactcctgacatcaggcaatccacctgccttggcctcccaaagtgctgggattacaggcgtgagccaccgaacctggcctttttttttttgagatggaatctcgctctgttgcccaggctggagtgcagtggtgagatctcagcaaactgcaaacttcacctcctaggttcaaacgattctcctgcctcagcctcccgagtacctgggattataggcgtgcactaccatgcccggctaattttttgtattattattattatttttttttttttttgagacggagtctcgctttgttgccaggctggagtgcagtggtgcaatctcagctcactgcaacctccgcctcccaggttcaagcgattctcctgcctcagcctcctgagtagctgggactacaggtgcctgccaccacgcccggctaatttttgtatttttactagagacgggttttaccatatcagccaggctggtctcaaactcctgaccttgtgatccacccatctcgacctcccaaagtgctgggattacaggcgtgagccactgcgcccggcctctttttaaaatttagaacagtagccaggcgtggtgactcacacctgtaatcccagcactttgggaggccgaggtgggcagaatacctgaggtcaggagttccagaccagactggccaacagggtgaaacccaatttctactaaaaatacaaaacattagctgggtgtggtggtgtgcacctgtaatctcagctactccgaaggctgaggcaggagaattgcttgaacctgggaggtggaggttgcagtaagccaagatcgcgccactgcactccagcctgggcgacagagcgagacatcgtttcaaaaaaaaaaaaagaaaagaaaaggaaaggctgggcgcggtggctcatgcctgtaatcccagcactttgggaggccaaggagggcggatcatgaggtcaggagatccagaccatcttggctaacatggtgaaaccccgtctcccatctctactaaaaatacaaaaaaaaaaaagccgggcgtggtggcgggcgcctgtagtcccagctactagggaggctgaggcaggagaatggcgtgaacccgggaggtggtgcttgcagcgagctgagatcgtgccactgcactccagcctgggcgacagagcgagactccgtctcaaaaaaaaaaaaaaaaaaagaaaagaaaaggaaaaggtcaaagactgacgagatggagagaaactagagtctttggaagtgacgttacatttgagctaggcaagcaggggagtagaggatgctcctggagcacagatcccgtggccaaagcctcagcccaagcctagtgtgtgcagtggaactgagaaggggccagcgtggcctagggcggggagaggactcagggaaagcaaatgcggagggaggcagcggcagccacttccggttctcaccataggttgtcttctctaccagcctcccgtcctcacggaagtcatctgtagctttgcccaggaggccacgcactgtgtaatccttcaaggacagggaggtaaagatccgtcagtgaccccattctaagccctagtagcccctgccccagaagctgggggtggggggtcctcaggtctccctcaggaagctcatgtgcccagcccctgcccagctgctccacagccccaggaggaagggcaccagctctgtcatgtggccttcagcagctcttgctctctttgtattcaagctctcctgtcacctggggacagtaacagggccagtctcacagtactgctgcctggattcagcaggacatggtacctggctcccagtcagcaggcttcctacaagactgctggctggtttccatgacaaccagcactggcagcctccaaaggtactgaccgctgacagccaccctgtggccaccccaggcctccatgtttctcctctccaacctaactcggcaatttatcaccccgagccccttctagcatgccctgtaggcttctctccacgcctctaaatagaatgagattccatggcccagatcaggcccttgctcatccctgcttgtaaaaactccccctcctctgaatctgtgcagctaaccccatctgccacagataagtaatgatcggctggatacagtgactcacacgtataatcccagcactttgggagacagaggcgggtggatcgtcgagtagctgggaggacaggcatgcgccaccagcctggctaatttttttgtatttttagtagagacaggttttcaccatgttgtccaggctggtcttgaactcctggcctcaagtgacccacccacctcagcctcccaaagtggcaggagccactgagcccggccacaatttttaaaatttttataatttaaaaaaattttgtaaatagagatggagtcttgctatgttgcccagactggtctcaaattcctgggctcaagcaatcctcctgcctcagcctcccaaagtactgggattacaggtatgagtcaccacacctggccctcattcccattttacagatgaggaaactgaggcacacagatattaattaggtaatctacccaaggacacacagctgtcagagtggtagaagctggggttcaaactgaagccatttggctccagaatttgtgcccttaaccactaaaaacatgggccccataacgtggcacctgcgtacatactttgtggtatcagactccatagccccgaccccacctctggatggtaagctccctgtgggtaggatgctgacatctacctctcagtcttgggacagaatagggaatggcatcatgatcaagctctggtgttggagagacctaggttcaaatcccagctcttaaagccctaacaactacatgacctaggtaagtaacatctcctctctgagcctcagttctctcatctgtgaaatgtggctaacaacagattccactttacagggaggctgtgaggcttccctaaaggaatccacgtacagtgctcagcacagagtagtcggcatacactaacactggtagttattattgttattattattacagcccctgcacagcacacgatcatcaaaaaaatgcttgcttatggcttgggtgttcccccacggaatcctctaagcttcagaatcctgctggtgacccccaggaaaggaccaagggagaagcaggctgtccccagaccctcgtaccttggtaagatgagcattgtacatatcggtgaggagcctgcatccatgtcccacgccgagcactgaaaagcagccagcgtcatctcacacctgggacccccttcccattcccctaagtatccccacccctacccccaccatcagaatactcccttttctgatgctgccaaaggcaacaagaaggcaaaaagatcttctacagggggcaggtgcacccctctgggtatatatcacatgcagattgctgggccttacccatatgcactgaatctgactcatggttggagggggcctaggatccctgccaagctctccacaggattctgacacctgagaggaagagatccctggcctagtcacacaaacctgcactcaaatcagggacagctctgagtataatctttagcctctttgagcgtcaagttccccatcagtaaaatgggggtaaaaatactgtctgaaggccaggcgcagtggctcatgcctgtaatcccagaactttgggaggccgaggcaggtggatcacctgaggtcaggagtttgagaccagcttggccaacatggtgaaaccccatctctaccaaaaaatacaaaattaaccaggtgtggtgctacactacactccagcttgggcaacaagagtgagactccgtctcacaaaaaaaaaaaaaaaaaattagccaggcgtggtggcgggcacctgtaatcccacctactcgggaggctaaggcagggagaattgcttgaacccaggaggcggaggttccagtgagccgagatcatgccattgcactccagcctgggagacagagcaagactctgtctcaggaaaaaaaaaaaatactgattcctgtgggtgctgtgcagtcggcacagaggaagggcccaataaacggtggccactgtggtcacttcctgcctttctcccggtctgtttctccctctggctgagggacagaataactctgcattcactcgtggggagacagaacagggagagggggcatgagatcatgtctgcctgcctgtgcctcaggaagcaagacaaggggactgtgactgtcgcggctggaggatgtgggcaccacctgaccctggggacacagatggctcatgactagggctttgtgtgtccagacccagccacatgcaggccctggccattaggtccagagtcacgcgcctggctgccccatgatgcaatgatggttttccttctccggaccaggggtattcactggccatgggacccagaacaagtcacctaaatcctactttcttcttccataaaatcatatagtatctacctaataaagttgttgtggtaaataaatgtgcataaagggcctcgaactatgtcatgtgtgggaatcactgaataaaggtgggtgactgtggtattaacctgtgattacctccgtcccacctatccactccccagctgatcagccttggggcaggaatcagggcaggagaggagtggtgggacgtgggtgccaggtaagaagtgggctgggctcctggtagcttcaggatcttttctcaagccttatcactgtacccccaggcttctcacatcacctaccaagtactccagaagcctgggcatccaaccgatgtcccacgccaaccttgagatgggcgaatgctggtccacatactggaaagaaacaaacaaggtccattttctcaactaaatgccaccccaggatggctttgggctgcatgttgacctcgttctcagaatgggcctcatggagcccaaactagcatcaggccagactctcaggcttccccgtcatggaatctgggaccctgaactgtatcctcagtgccctgggatccaaagggcagcccaagatgcctcttactctgcctatcatcagtctcccagtgagaggctctaagaagactggcgtaacactgaaggtcaagagtgcggggttccctgcccagctctactgaggaagagtccctggaggaaaatggaggctgtgagctccttaaggcagaacctgggtgtgtcaactcactagctgctcaggaaagaactactgaaagaataaatgcaggaatgagccagaagtgtttacacttctacagattaagaggaatctaggggaagagtccagggtagttaagggcctattgaatccaggccatgttactaaatgtcaacactgagcctcagttttctcccttgtgaaatgaaaataggacccatctcacagcactgtggtgatatcaatgaggattgtacttgggggaagcttaacacaatgcctagtacagagtggcgactcaatacattatacttcttattgttaccatataatagagtcattgaatatcacaagtccaacgggtttttgaggtttctggtcaaacctctagattccctgacacatgccttaatcacatctagtgatggggacacattaccagaaccagttccattgttgggcaactttattcagtaaaaaaatcactctttcggctgggcgcagtggctcacacctgtaatcccagcactttgggaggccaaggtgggcggatcacctgaggtcaggagttcgagaccagcctggccaacatggtgaaaccccatctctactaaaaatacaaaaattagctgggtgtggtggcacacacctgtaatcccagctacttgggaggctgaggcaagagaatagcttgaacctgggagatggaggttgcagtgagctgagatcacaccactgcactccagactccagcctgggcaacagagcaagactctgtcaaataaataaataaataaacttattctttcccagaaacccaaaacccctaccttaggacttctacctagggtctcatttctcacctggagtcccagaatagaaaaagggtcagcaaactacagtccacaagtcaaacctgaagactgaagactgttttttttttgtgtgtgtgtgtttgcttgttttgttttgttttgttttgagatggagtctcactttgtcacccaggctggagtgcagtggcgccatctcaactcactgcaacctccacctcccagattcaagcgattctcatgcctcagcctcctgagtagctaggattacaggcacctgcctccatacctagctaattttttgtatttttagtagagacggagtttcatcatgttggccaggctggtcttgaactcttgacctcaagtgatccgcctgcctcggcctcccaaagtgctgggattacatgaatgagccaccgcatctggcttgttttttgtggcctatgagttaagaatggtttttgcatttttcagtggttcaaaataaatcaagagaccagttgcaagggctcacgcttataatcccagcactttgagacgccgaggcaggcagatcacttgagcccaggagttcaatactagcatgggcaacgtgacaaaaccccatctctacaaaaaatacaaaaattagccaggcatggccgggcgtggtggctcacacctgtaatcccagcactttgggaggccgaggcgggtggatcacgaggtcaggagatcgagactatcctgcctaacatggtgaaaccccgtctctactaaaaatacaaaaaattagctgggcgtggtggcgggcgcctgtagtcccagctactcgggaggctgaggcaggagaatggcgtgaacccaggaggagaagcttgcagtgagccgagatcgtgccactgcactccagcctgggcaacagagcatgactccgtctcaaaaaaaaaaaaaaaattagccaggcatagtggcctgtgcctgtagtcccagctactcgggaggcttaggtgagaagactgcttgaactcaggaggcagaggtttcagtgagccgagatctcaccactgccctccagcctgggtgacagagtgagaccctgtctctaaataaatagaatactacagttgtcccttggtatccaaggggattgggtccaggatcccttgcagataccaaaatttgtagatgttcaagtccctgatataaaatggcatagtatttgcatataacctaggcatgtcgtcccatataccttttttttttttttttgaggcagagtctcactctttcacccaggctggagtgcagtggcacgatcatggctcaccacaacctctgcctcccaggttcgtgcgactcctcgtaactcagcctcctgagtagctgggattacaggtacgtgctatcatgcccagctaatttttactagagacggggctttgccatgtcttgaactcctgacctcaagtgatccgcccaccttggcctcccaaagtgcagcgattacaggcgtgagccaccacacctggccactttttttttttttgagactgagtctcgctgtgtcgcccaggctggagtgcagtggcacgatctccgctcactgcaagctccgcctcctgggttcacgccattctcctgcctcagcctctggagtagctgggactacaggcgcccaccaccacgcccggctaatttctttgtatttttagtagagacagggtatcaccgtattagccaggatggtctcgatttcctgacctcgtgatccgcccacctcagcctctttattttttttggagacagagtctcactctgtcacccaggctggagtgcactggcacagtctcggctcactgcagcctctgaactcctgggctcaagtgattctcccacctcaacctcccgagtagctggaactacaggcatatgccaccccacctggctaatttttttttttttttgagacagtttcactcttattgtccaggctagagtgcaatggcacaacctaagctcaccgcaacctccgactcccgggttcaagcaattctcctgcctcagcctcctgagaacctgggattataggcatgtgccaccacacctgtctaattttgtatttttagtagagacggggtttctccatgttggccaggctggtctcgaactcccgacctcaggtgatctgctcgcctcagcctcccaaagtgctgggattacaggtgtgagccactgcacccggccttttgtattctcttgtagaagtagggtttccccatgttgcccaggctgatgttaaactcctaggctcaagtaatccaccgcctcagcttcccaaagtgctgggattacaagcatgagccaccaggcctggccttcccatatattttaaatcatctctagattacctttttttttttgagacggagtctcgctctgttgccaggctggcgtgcagtggcacaatttcggctcactgcaacctccgcctcccgggttcaagtgattctcctgcctcagcctcctgagcaactgggactacaggcgcctgccaccactcccggctaatttttgtatttttagtagagacggggtttcaccatgttggccaggatggtctcgatctcttgacctcatgatccaccctcctcggcctctcaaaatgctgggattacaggcgtgagccaccacgcctagctagattacttataatgcctaatataatgcctatgcatcaccttgagtggattcaacacagtactaggtgcacagcaaattcaagttttgctttttggaactttgtgtttttcttcccaaatactgccaatctgaagctggatcatgggatgtggaactcatggactcagaggcaactgtacttagtgacacgtgaaaattacctgaagttcaaatatgaatattcataaagttctattggaatacagctaggctcattcctttagatactgtctatagctgtttggcactacattggcagagttgagcagttccaacggaaatcacatggcctgaaaactaaaacattcagtatctggccctttccaaggaaatctgccaattcctggtctaatacctcactcctctgtggaccttcaagggcctggcacaggaatctgagcactgggacactgactcggctcagggatttcctgggaagtgacacacaggatcctgcttaaatctgccttacccagtggatggttgatgaaagagggtacgctggtggctgtgagggtcagctccttctcttcgctgccttccatggggcccagcaagaagcgaacacgctgtttaggagcgggaggcttcctggcattgagacctgaacacacagagataatatatacacacatacatacaaatatatgtacatataaaatattttttaagagacagggcctcgttctgtagcccaggctgaagtgcaatggcgccatcatagctcactgtaacgtcaaactcttgggctcaagcgatcctcctgcctcagcctccagagtagctgggattacaggcgtgcaccacgatgctgaccaggaatatcttgttctgtccaaacacttgggggattagacaacagggaagtatgatgtagaagacaaagcagaagcccatggtgcagagggcagtatagcagtagttaagaaacaggcggattcaaacagactctacaacgtagtaaccgtgtgacaaggaacaatactgagtcagtttccccctcggaaaacagaggaaagtgaggagtaagaaagcacagagaacaggcgtttgggaaagcgctctgcccaggtgaataggtcacgtgattttgttttggggtaaggaccagaagcggagatggacttccaagagaacgagagcgggaacgtgggtctggttcgaggcactcacccttcagaagttgtagctccactgtatcccgcaggtgcttccattttagccccgggggcttatagaccgcgaaaagcccatgcagccgcgacaagccagcagaccccatacttgaagatcacagcacccgctggacct

SEQ ID NO: 682 - DNA, 667 bp, Homo sapiens
agcacttctaaatgctagtgggaagaccaaaaccatataaaatatatatcatagtcatttaaaaaattagtttctgctatgaggcagacttagcttgataaatttcaaatagcctttctcaatatcagaattttttttcttttgttactggttcagtaacaatcaacaatatcaagcaattagatgaattaatgaaagccacaggatatatgatatctgttaatagagaacattcagaaatgaaaaaaaaatttgccaacttccttctagagcaaaacattcttctggagcacaattctcattcattgaatatccaactgtgaaaccactaaaggaactgcccagcagatcgccttaaagcagcagttctcaaatattttggtcttgggacccttttacactcttttttttttttgagatggagtcttactctgtcgcccaggctggagtgcagtggtgtgatctcagctcactgcaacctctgcttcccgggttcaagtgatttgatcctgcctcagcttcccaagtagctaggattacaagcacgtgccaccacgcccagctaattttttgtatttttagtagagatgcagttttatcgtactagccaggatggtctcgatctcctgaccttgtgatctgcccacctcggtctcccaaagtgctg

SEQ ID NO: 683 - DNA, 509 bp, Homo sapiens
atgttttctgagagttcaataaaatgcagagaatcatttccagtaaataagaaaaatctcagtttcataagcaaactctgtatctgaatcagatatcctttcccatggcccaactaatatgcatgattcatgggcctctacgtagattgaaatctgtgtaaaatctgcttataagtacataaggaaatgaagctcagagctctattaaaaaacagtagtgttgttatctgtcaagttgtggtacaaaccgtttgagagccaagattccagagaagagatgtaagcaatgattatggttatttatatgattcaaaaaggagcaaacagaatgctaaccactaaaaaaaccatctaatgccactaaatatagaacaccttatatgcctcgacatgtctaagcaagcacaccctccttgcagcacagtgctaagaccttagtggatcattctctgacttctgctttttatcaacatcaaattacctttcagctcattgacacagatgcgcaa

SEQ ID NO: 684 - DNA, 1515 bp, Homo sapiens
tgaggtcagaagttcgagaccagcctggccaacatgatgaaaccctgtctctacgaaaaatgtaaaacttagccaggcgtggtgacatgcacctgtaatcccagctactcgggaggctgaggcaggagaatcgtttgaaactgggaggcgaaggttgcagtgaaccatgatcacgccactgcactcaagcctgggagacagggagggacttcgtctcaaaaataaataaataaagtatacaggaggatgtgcatacattatatgcaaatacacaatgctacgccatcttatataagggacttgagcacccaaggattctggtatctgaggggtcctagaaccaatccttcatggtttctgagggatgctttaaaactgccaagtctgacattttgaaaatacaactgagcaacttgttttattatgcaatagcccattaaaagcgtgtggtgattttgttctcttgaacaaaaatgatataggagtgaatcatatcaggctggatgggaaggcaagcattgttcatagccaagtattttctaaaggcaaacgggtttacagccataccagcctgaaagtgtccatcttgtctaacggcaaatggctgccagggacgcggcctggcctctcctgccacatcttctgggtaaaggtgatcagggtaggtgtcttatcactactccagagctttagaatttaaaaaattaagccataggaataaaacacctaaaagtcaggacaggtccccatttgaatttgttcagctgttgtccttgtaaaagctcctgacatcactttgctctctagaactgttcaggggccaggggacttgagactaaaagtcaggaagcccaacaaacagacaattttaaactgagaaatacagtttatttttttctgtaaacctgatttttcccccccttggagaaacactagatacattttaagagatgaataatctgtatataaatattgctactctactttttctgccctaaatgattatttttaaaaattttatataatctagcagttccactcttaagaaatattgttaaaggaaaaacttcctgtagaatgaggtcatcacaattcctgcatgcccccaggtggaagcccaagggggaaaacaggtgttttttttgagacggagtctcactcttgtcacccaggctggagtgcaatggtgcgatctcggttcactgcaacgtctgcctcctgggttcaatcgattctcttgcctcaggctcccgagtaactgggattacaggcacctgccaccacgcccggctaattttgtgtttttagtagagacagggtttcaccacgttggccaggctggtctcgaatgcctgacctcaggtgatctgcccacctcggcctcccaaagtgctgggattacaggtgtgagccaccacactaggccaaggaaaataggttttctcttgagtgccagctgtcatcaactattagctgtgctggggtttctaagcttcagtgacacacagtgctgat

SEQ ID NO: 685 - DNA, 4699 bp, Homo sapiens
tagaaaccatttgctagtgagatacaaattttgaagttgtctgtaaattgaatttttataaattaaaatggaattatttaggtcaccgatttttgttttttttctctcatgcagtcaattctttgaggcctgtgcctcacagatgtcagtggttagtatcctgactggctttgactagtggctaatcatgtgctttttgtctctttattacacccaaacaccataaacagagccaatgaagagattgctcaggttcgaacaaaagcaaaggctgagagtgcagctctccatgctggactccgcaaagagcagatgaaggtggagtccctggaaagggccctgcagcagaaggtacagaaagggacctgatctgggtggccacagagacgtttggttttcctcctcagcagtgactcacttaatgacagatctgggtgaaagaggccttggctttctactcagacatttcagtccagctcctttctgaactgatccaggtggaaacaaacaagtcaaaccattaaattttcaagcacatcatgtggaaatcatccacaggcagggtgcagagaggaagttgcattttaactgaagttcagaacagcttcctagttggggtcatgagactgcctttctttctttctttgttttttatgcaatatattaatatgaagccatcttcccccttcattgctttagatcagtggtttgcagttgggggcagttttgccctccaggggatgttaggtgttaggtaatgtctggagatatatttgtttggttgtcaccactgggagatgctgctggtatctagtgcaggaagccagggatgctgttaaacatcctacaatgcacaggacagcctctgacaacacatttacccatcctaaaacatcagcagggctgctttgagaaactgctatagataaatgaaaaccaggactagcaacaatccctgtttctcactaagcaatttttagctttccgtttttatatgtctccggtgtattttctttactgcatttccaattatgtactcatacctgtgccatccattcatcaagagcaggagtttttatcacagggtctgttagcccctagaacggtgctccctgggagattcagactccagcatccctagatatgctaatggattgagtgagacccagatacttatgtttttgacaagtaccccagataattcctctgataacaagaaaattggggaactaagagattcatggacaagtttcagagggctggtgactgtcctcaccctttactcaatttaagcatgattttatgagtacattttttgaggtgtgtagcctttttttctttaaagcatctctgatgtagaaaagttaaaaatcactgaattaggatgtctagggtagggtagatccagacttgggactagttaactctatttgcctttatttcagaatacaaagtggcctgcataattatgtcatttgtctttcagaaccaagaaattgaagaactgacaaaaatctgtgatgagctgattgcaaagctgggaaagactgactgagacactccccctgttagctcaacagatctgcatttggctgcttctcttgtgaccacaattatcttgccttatccaggaataattgcccctttgcagagaaaaaaaaaaacttaaaaaaagcacatgcctactgctgcctgtcccgctttgctgccaatgcaacagccctggaagaaaccctagagggttgcatagtctagaaaggagtgtgacctgacagtgctggagcctcctagtttccccctatgaaggttcccttaggctgctgagtttgggtttgtgatttatctttagtttgttttaaagtcatctttactttcccaaatgtgttaaatttgtaactcctctttggggtcttctccaccacctgtctgatttttttgtgatctgtttaatcttttaattttttagtatcagtggttttatttaaggagacagtttggcctattgttacttccaatttataatcaagaaggggctctggatccccttttaaattacacacactctcacacacatacatgtatgtttatagatgctgctgctcttttccctgaagcatagtcaagtaagaactgctctacagaaggacatatttccttggatgtgagaccctattttgaaatagagtcctgactcagaacaccaacttaagaatttgggggattaaagatgtgaagaccacagtcttgggttttcatatctggagaagactatttgccatgacgttttgttgccctggtatttggacactcctcagctttaatgggtgtggcccctttagggttagtcctcagactaatgatagtgtctgctttctgcatgaacggcaatatgggactccctccaagctagggtttggcaagtctgccctagagtcatttactctcctctgcctccatttgttaatacagaatcaacatttagtcttcattatctttttttttttttttgagacagagtttcgatctattttaagtatgtgaagaaaatctacttgtaaaaggctcagatcttaattaaaaggtaattgtagcacattaccaattataaggtgaagaaatgtttttttcccaagtgtgatgcattgttcttcagatgttgaaaagaaagcaaaaaataccttctaacttaagacagaatttttaacaaaatgagcagtaaaagtcacatgaaccactccaaaaatcagtgcattttgcatatttttaaacaaagacagcttgttgaatactgagaagaggagtgcaaggagaaggtctgtactaacaaagccaaattcctcaagctcttactggactcagttcagagtggtgggccattaaccccaacatggaatttttccatataaatctcaatgaattccctttcatttgaataggcaaacccaaatccatgcaagtgttttaaagcactgtcctgtcttaatcttacatgctgaaagtcttcatggtgatatgcactatattcagtatacgtatgttttcctacttctcttgtaaaactgttgcatgatccaacttcagcaatgaattgtgcctagtggagaacctctatagatcttaaaaaatgaattattctttagcagtgtattactcacatgggtgcaatctttagccccagggaggtcaataatgtcttttaaagccagaagtcacattttaccaatatgcatttatcataattggtgcttaggctgtatattcaagcctgttgtcttaacattttgtataaaaaagaacaacagaaattatctgtcatttgagaagtggcttgacaatcatttgagctttgaaagcagtcactgtggtgtaatatgaatgctgtcctagtggtcatagtaccaagggcacgtgtctccccttggtataactgatttcctttttagtcctctactgctaaataagttaattttgcattttgcagaaagaaacattgattgctaaatctttttgctgctgtgttttggtgttttcatgtttacttgttttatattgatctgttttaagtatgagaggcttatagtgccctccattgtaaatccatagtcatctttttaagcttattgtgtttaagaaagtagctatgtgttaaacagaggtgatggcagcccttccctagcacactggtggaagagaccccttaagaacctgaccccagtgaatgaagctgatgcacagggagcaccaaaggaccttcgttaagtgataattgtcctggcctctcagccatgaccgttatgaggaaatatcccccattcgaacttaacagatgcctcctctccaaagagaattaaaatcgtagcttgtacagatcaagagaatatactgggcagaatgaagtatgtttgtttatttttctttaaaaataaaggattttggaactctggagagtaagaatatagtatagagtttgcctcaacacatgtgagggccaaataacctgctagctaggcagtaataaactctgttacagaagagaaaaagggccgggcacagtggcttattcctgtaatcccaacactgtggaaggccgaggcaggaggatcacttgagtccaggagtttgaaacctacctaggcaacatggtgaaaccttgtctctaccaaaataaaaattagctgggcatggtggcacgtgcctgtggtcccagctacttgggaggctgaggtgggagcctgggaggtcaaggctgcagtgagccatgatcatgccactgcactccatcctgggtgacagcaagatcttgtctcaaaaaaaaaaaaaaaaaaaaaaaacccaggagtgaaaaaggaaagtaaaaggcagctgctggcctaaatgttggtttgggaatattaggtgatcctgttgaaattctggatccaaagcaatttctttagcttttgactttgccaaagtgtaaatagcctttatccaccagttttttaaggggggaatgcaacgggaggccaactgaacaattccccccgtggctgcccagatagtcacagtcaaggttggagagtctccttccagccagggacctacccaaaccttttgttctgtaaaactgctctggaaataccgggaagcccagttttctcacgtggtttctagcttcttcggactcagcccaatttaggagtgccgaagcacatgatgg

SEQ ID NO: 686 - DNA, 492 bp, Homo sapiens; identical to SEQ ID NO: 121

SEQ ID NO: 687 - DNA, 258 bp, Homo sapiens
ttctggagacagagtcgcactctgtcacccaggctggagtgcagtggcgtgattttggctcactgcaacctccacctcccgggttcaagcgattctcctgcctcagcctcccgagtagctaggactacaggtgcacaccaccaagcccggctaatttttgtatttttagtagagacgggggtttctccatgttggccaggctggtctcgaactcctgacctcaggtgatccacccgcctcggcctcccaaagtgctgg

SEQ ID NO: 688 - DNA, 2680 bp, Homo sapiens
cttcggacaagtggaacagaaccaaagataaagtattatgcagagatgtgtgcgtcacctgaccagaggtaagaattgatttttttaagatatacatacaaaagctttattgaaatataattcacataccatacagctcacgcacttaaaatgtacaattcagtggcttttagtatgttcaaagttgtgcatccatcactgtaatcaattttagaacattttcatcacccccaaaagcccgtagccatgagaaatcacttcccatttccctcctttacggccctcagcaaccccaatctactgtctttctctatagatttgcttcttttctgggcatttcatataaatggaatcatacaatatgtgggcctttgtgactgccgtcttttacttagtataatggtttctaggttccaccatgattcagttgtagcatgaatttattcctttttttaaagttttgttttttatggcccaacaatattccattgcatggctatgccatgctttttaatccattgatcatttgatggacattcagattatttgcactctttggctgttttgaatactgttatgaacatttacatacaggtttttgtgtgaatgtatgttttcatttctcttaggtatatacctaggagtgaactgctgggtcatatggtagctctgtgtttaaccttttgaggaactgccagaccattttttaaagcagctacatcatttgggaattgaattttaaaattgtattgaatttctattcttggaaagattctctgagctttaagtattatgtgattaacataaggaaattatcatcaaataatttgtttattgccaaatatccattttctatgtctaatatgacttgacataatctgttcagttcatttccttttaagaggatgaattgtgactaagtgaatttcataaacatattcaaaggctacttaaatgtattaaaagtactgtctcctataatattgtaattgctcaatatatatttgggaaggagattttttagaattgctttcagagtccaaccaagctatactattttgtatttccccaaatctttgcatttaaggatagatttcatttcctttgggggggataaagagcccccgaagtcattcaaagtagaatctaaagtaaaccaaattgggtaatgctacatctggttgaaaatgaaggaagattattaaagtaataagaactgatttgttgtgtagcttttaaaatgactgtaaaggcagtttaaaagaggcttgcctcgaaatgttctgggcaacggcagcacctcagtgatgactttcaagggccttcttttaagtgcacatttatttttttaaacatcacgttattttagtcacacctccttctgctacctgaaagatatatcattccataacatctgtactgaatatttttcaaagtatttcaggaagccattttctcctaacacctggtatttgtgttcaaagccattagaacctcattctcctgacccaggagaattctttagatacaccatcactcctctgtttatcatgtgccaaggaactcctattaatgcagttcaccttcagtttgtgatagcagtgttttctttgtgtgtaatttttttttttggtcttgttttgttttaaccaagtgaatttctcttttgtttaccaattgtttaatgactccatcaggacctcttaaaaaatcacactaatttaaataaattttaagcctatgaaaataaataattccaaaactcttcatcttttcctcagtgacactgctttactggaggaagaactgaagaaactcattgatgctctgatagagaattttcttcagcctagtaagaatggactgatctggcgttctgtttaggggtacaccaatatgtcatgacactgtgtgggcatatggaacagagcaaccgagaactgcatacattgaaccttgtgttagcattctctctctatctcatctggccgagtatctttttccttttattttctttctttttggtcaactggctagactaaaccaagtataagtttgaaatgaaatggtctagagggaaatgattcaaattttttcataattcaaacaaaagttattacactaaaagtattatagtaacgtattgtccttccgttaacagaaacatcacaattcaaaagtgagttttcttattatagtgtgattaagcctagttctgtatctcgtaattgtgtatagcatggtaaaagaaaaaaaaaaagacaggtaaatgttatataattgtagggttagttaaggaaattagtccataaaattggcagaaaatggtactttccttgattgttatgaaaaagtgtcattgtgacatcacaggtattaatttacaaattagagtatttgaaataggatatttagcatttctgtagtttagaacagatgttacagtgtgtggttttggcatgtctgtttcaggtgcccttggtgcagtataaatttactgtatgtatttaaaattctgatgtttactgaacataaaacaatagtggcaacactcctattggctttgttcttatcaaatttctcagtgccttctcagggtctggtgtgaacagaaaaaacagtgttcctgcatttaccataatttaatcagtcaatttgcagatagctaaggaaaatcttc

SEQ ID NO: 689 - DNA, 5532 bp, Homo sapiens
cttcggacaagtggaacagaaccaaagataaagtattatgcagagatgtgtgcgtcacctgaccagaggtaagaattgatttttttaagatatacatacaaaagctttattgaaatataattcacataccatacagctcacgcacttaaaatgtacaattcagtggcttttagtatgttcaaagttgtgcatccatcactgtaatcaattttagaacattttcatcacccccaaaagcccgtagccatgagaaatcacttcccatttccctcctttacggccctcagcaaccccaatctactgtctttctctatagatttgcttcttttctgggcatttcatataaatggaatcatacaatatgtgggcctttgtgactgccgtcttttacttagtataatggtttctaggttccaccatgattcagttgtagcatgaatttattcctttttttaaagttttgttttttatggcccaacaatattccattgcatggctatgccatgctttttaatccattgatcatttgatggacattcagattatttgcactctttggctgttttgaatactgttatgaacatttacatacaggtttttgtgtgaatgtatgttttcatttctcttaggtatatacctaggagtgaactgctgggtcatatggtagctctgtgtttaaccttttgaggaactgccagaccattttttaaagcagctacatcatttgggaattgaattttaaaattgtattgaatttctattcttggaaagattctctgagctttaagtattatgtgattaacataaggaaattatcatcaaataatttgtttattgccaaatatccattttctatgtctaatatgacttgacataatctgttcagttcatttccttttaagaggatgaattgtgactaagtgaatttcataaacatattcaaaggctacttaaatgtattaaaagtactgtctcctataatattgtaattgctcaatatatatttgggaaggagattttttagaattgctttcagagtccaaccaagctatactattttgtatttccccaaatctttgcatttaaggatagatttcatttcctttgggggggataaagagcccccgaagtcattcaaagtagaatctaaagtaaaccaaattgggtaatgctacatctggttgaaaatgaaggaagattattaaagtaataagaactgatttgttgtgtagcttttaaaatgactgtaaaggcagtttaaaagaggcttgcctcgaaatgttctgggcaacggcagcacctcagtgatgactttcaagggccttcttttaagtgcacatttatttttttaaacatcacgttattttagtcacacctccttctgctacctgaaagatatatcattccataacatctgtactgaatatttttcaaagtatttcaggaagccattttctcctaacacctggtatttgtgttcaaagccattagaacctcattctcctgacccaggagaattctttagatacaccatcactcctctgtttatcatgtgccaaggaactcctattaatgcagttcaccttcagtttgtgatagcagtgttttctttgtgtgtaatttttttttttggtcttgttttgttttaaccaagtgaatttctcttttgtttaccaattgtttaatgactccatcaggacctcttaaaaaatcacactaatttaaataaattttaagcctatgaaaataaataattccaaaactcttcatcttttcctcagtgacactgctttactggaggaagaactgaagaaactcattgatgctctgatagagaattttcttcagcctagtaagaatggactgatctggcgttctgtttaggggtacaccaatatgtcatgacactgtgtgggcatatggaacagagcaaccgagaactgcatacattgaaccttgtgttagcattctctctctatctcatctggccgagtatctttttccttttattttctttctttttggtcaactggctagactaaacaaagtataagtttgaaatgaaatggtctagagggaaatgattcaaattttttcataattcaaacaaaagttattacactaaaagtattatagtaacgtattgtccttccgttaacagaaacatcacaattcaaaagtgagttttcttattatagtgtgattaagcctagttctgtatctcgtaattgtgtatagcatggtaaaagaaaaaaaaaaagacaggtaaatgttatataattgtagggttagttaaggaaattagtccataaaattggcaagaaaatggtactttccttgattgttatgaaaaagtgtcattgtgacatcacaggtattaatttacaaattagagtatttgaaataggatatttagcatttctgtagtttagaacagatgttacagtgtgtggttttggcatgtctgtttcaggtgcccttggtgcagtataaatttactgtatgtatttaaaattctgatgtttactgaacataaaacaatagtggcaacactcctattggctttgttcttatcaaatttctcagtgccttctcagggtctggtgtgaacagaaaaaacagtgttcctgcatttaccataatttaatcagtcaatttgcagatagctaaggaaaatcttccaaaatctgtaggtgcttcctctatatcaagtgagtttgctgattttaaaatcttaggaatataaataaagatcttaataaaagcaagcttaatgtagttaaggatcttcatattagaattgtgtcatttatcaaaccttttattacagaaaaaaatctgaactgagaaaggagctctgaatttatttgacagtctaacttttgaattacatttttgtaagtagatttattcttttattttatgaagtaatgttaattttactaagaataaaacatccaaattttaagtattatgaaatactaaaactacatgttttaaaacagaggtccagtttattctaacatcttgctgacttctgtagaatttctgattgcatgactattatttatcttcttttagtgtagaaaataattttttacaaaaagtcacttttgggctgggcgcagtggctcacgcctgtaatcccagcactttgggaggctgaggcaggtggatcacaatgtcaggagtttgagactagcctggccaatatggtgaaaccctgtctctactaaaaatacaaaaattagccgggtggtggtggtgggcacctgtagtcccagctactcgggaggctgaggcaggagaattgcttgaacctaggaggctgagattgcagtgagccgaaatcacgccactacactccagcctgggcaacagagggagactccatctcaaaaaaaaaaaaagtcacttttggctaatcatgcagtcttctgaaaaggtttaatagagaaatgctgtttaggctgggcttggtggctcacatctgtaataccagcgctttgggaggctgaggcaggaggattgcttgaggccaggagtttaagttacagaactatgatcacactgccgcactgaagcctggatgacagagtgagaccttatctcaaaaaaaaaaaaaaaaagagagagagagagaaaaagaaatgctgtgtttaatcttcttaaaatgtatcttgtcctacatagttctcagaatacatatggggtatagttaggagataacaataacaagacctaaacaaattgcttatgggagatagcactgtaattagagaatttatttcatataaaataataatataaagtttgaactgattagaatgttccttaaatcatggtttcgtttgttgcagctgtcagctaacatttggttgagctcatataatccaaacctaattgtccaactattgtattgccactattgttaatttgttccttccttactttcttattgttggatcttatatgactgtatgactgtagataatagacagctagctaaatgtagagcaccatttttctcaatgagtttgttttcaaaggctttgcactggagaagatatgtgtagaatttttgttttatttttaaaatgtgtaaaacatcttttgttttatatgcttttaagaatgtagattgtaatttaggaaatggcatatattctgcaaagtggtataatgttgtatatatgaaaaacaggtatatttggtttagttctgtgtttcagtgactgataaacaaaaatgaagctaaaatgaatcaacggctcattcatagttactaaagccatgtcatgactgtcattctattatgaagaaaacagttttatttgagtgctttaatataatgcaacatttaagtcatcttaaggtgaaaagttattgaagtgttcttctctcaagttaacaaaattttacaaatgttcctgaagtgtatcgattgagggaattattttattctagcctgtcatgagtctgtctgagcatgatacttaacatgaacttgatgtagtaggtgcacatttgcctaacaggataaattcagtgatagcccaagctggtcaggagagacagaagtgctggctaggaggtctcagcctcgggcactacaatgtttatctttttctttttgaacaatattgtgaaaatgattgcattctcattgagcatgaaagtcaaaactggaattttctaaagctttggagaaaaggagagaattagtagggcaagatcaaagcatacattggaaataaacagtagaaataagcaaacaatataaagagacacgggaaatgcttctcgtgaagggcaaatgtaacaccataacagtagggaataaactgtgtcccacctgtttacttgtgtttatttgttgttatgatgagtatgcacctaccattttcctttattgtgatcactaaaatgaggccaaggtttaggaggtgagaaaaagtatcccttttacggattcagttcctgctaggatgttgtatcagaatcatgtgagaactcaggaagaggtagagcagaaataaaaaggaagaaaatgtagattagaaaataagacttctgagaaaaagttcaaggaataaagattgtttgactctggagaggagaaagctgttgagatagtttgctaagtttgctaataaagctttattgagtcttttattgaagggttcaaagtaagaaatactatgccatagtgttctccatctctagtgaagacagaaccagagggaataaggatcttttttttaaagacagcatggaaagtttaagatttaggaacttcttgagaaatcttcataatatcttctattcaaaatcttttttttatttttaagggaataaaaattttaaaaattaagagatatacagatgactttttaagggtccttctttccagcacattttttttaaaaactcaggttagaacaaaaatgtcataaagggcactaaaagtaacatttgggtttcactccatatctagaagaatttagctcacaaaacaatttttgtgtgttt

SEQ ID NO: 690 - DNA, 7166 bp, Homo sapiens
cttcggacaagtggaacagaaccaaagataaagtattatgcagagatgtgtgcgtcacctgaccagaggtaagaattgatttttttaagatatacatacaaaagctttattgaaatataattcacataccatacagctcacgcacttaaaatgtacaattcagtggcttttagtatgttcaaagttgtgcatccatcactgtaatcaattttagaacattttcatcacccccaaaagcccgtagccatgagaaatcacttcccatttccctcctttacggccctcagcaaccccaatctactgtctttctctatagatttgcttcttttctgggcatttcatataaatggaatcatacaatatgtgggcctttgtgactgccgtcttttacttagtataatggtttctaggttccaccatgattcagttgtagcatgaatttattcctttttttaaagttttgttttttatggcccaacaatattccattgcatggctatgccatgctttttaatccattgatcatttgatggacattcagattatttgcactctttggctgttttgaatactgttatgaacatttacatacaggtttttgtgtgaatgtatgttttcatttctcttaggtatatacctaggagtgaactgctgggtcatatggtagctctgtgtttaaccttttgaggaactgccagaccattttttaaagcagctacatcatttgggaattgaattttaaaattgtattgaatttctattcttggaaagattctctgagctttaagtattatgtgattaacataaggaaattatcatcaaataatttgtttattgccaaatatccattttctatgtctaatatgacttgacataatctgttcagttcatttccttttaagaggatgaattgtgactaagtgaatttcataaacatattcaaaggctacttaaatgtattaaaagtactgtctcctataatattgtaattgctcaatatatatttgggaaggagattttttagaattgctttcagagtccaaccaagctatactattttgtatttccccaaatctttgcatttaaggatagatttcatttcctttgggggggataaagagcccccgaagtcattcaaagtagaatctaaagtaaaccaaattgggtaatgctacatctggttgaaaatgaaggaagattattaaagtaataagaactgatttgttgtgtagcttttaaaatgactgtaaaggcagtttaaaagaggcttgcctcgaaatgttctgggcaacggcagcacctcagtgatgactttcaagggccttcttttaagtgcacatttatttttttaaacatcacgttattttagtcacacctccttctgctacctgaaagatatatcattccataacatctgtactgaatatttttcaaagtatttcaggaagccattttctcctaacacctggtatttgtgttcaaagccattagaacctcattctcctgacccaggagaattctttagatacaccatcactcctctgtttatcatgtgccaaggaactcctattaatgcagttcaccttcagtttgtgatagcagtgttttctttgtgtgtaattttttttttgggtcttgtttggttttaaccaagtgaatttctcttttgtttaccaatggtttaatgactccatcaggacctcttaaaaaatcacactaatttaaataaattttaagcctatgaaaataaataattccaaaactcttcatcttttcctcagtgacactgctttactggaggaagaactgaagaactcattgatgctctgatagagattttcttcagcctagtaagaatggactgatctggcgttctgtttaggggtacacccatatgtcatgacactgtgtgggcatatggaacagagccaccgagaactgcataccttgaaccttgtgttagcattctctctctatctcatctggccgagtatctttttccttttattttctttctttttggtcaactggctagactaaaccaagtataagtttgaaatgaaatggtctagagggaaatgattcaaattttttcataattccaaccaaagttattacactaaaagtattatagtaacgtattgtccttccgttaacagaaacatcaccattcaaaagtgagttttcttattatagtgtgattaagcctagttctgtatctcgtaattgtgtatagcatggtaaaagaaaaaaaaaaagacaggtaaatgttatataattgtagggttagttaaggaaattagtccataaaatgggcaagaaaatggtacttcccttgattgttatgaaaaagtgtcattgtgacatcacaggtattaatttacaaattagagtatttgaaataggatatttagcatttctgtagtttagaacagatgttacagtgtgtggttttggcatgtctgtttcaggtgcccttggtgcagtataaatttactgtatgtatttaaaattctgatgtttactgaacataaaacaatagtggcaacactcctattggctttgttcttatcaaatttctcagtgccttctcagggtctggtgtgaacagaaaaaacagtgttcctgcatttaccataatttaatcagtcaatttgcagatagctaaggaaaatcttccaaaatctgtaggtgcttcctctatatcaagtgagtttgctgattttaaaatcttaggaatataaataaagatcttaataaaagcaagcttaatgtagttaaggatcttcatattagaattgtgtcatttatcaaaccttttattacagaaaaaaatctgaactgagaaaggagctctgaatttatttgacagtctaacttttgaattacatttttgtaagtagatttattcttttattttatgaagtaatgttaattttactaagaataaaacatccaaattttaagtattatgaaatactaaaactacatgttttaaaacagaggtccagtttattctaacatcttgctgacttctgtagaatttctgattgcatgactattatttatcttcttttagtgtagaaaataattttttacaaaaagtcacttttgggctgggcgcagtggctcacgcctgtaatcccagcactttgggaggctgaggcaggtggatcccaatgtccgggagtttgaaaataacctggcccattatggtgaaaccctgttctctactaaaaataccaaaattagcccggtgtggtggtgggcccctggtagtcccagctactcgggaggctgaggcaggagaattggttgaaacctaggaggctgagattgcagtgagccgaaatcacgccactacactccagcctgggcaacagagggagactccatctcaaaaaaaaaaaagtcacttttggctaatcatgcagtcttctgaaaaggtttaatagagaaatgctgtttaggctgggcttggtggctcacatctgtaataccagcgctttgggaggctgaggcaggaggattgcttgacggccaggagtttaagttacagaactatgatcacactgccgcactgaagcctggatgacagagtgagaccttatctcaaaaaaaaaaaaaaaaagagagagagagagaaaaagaaatgctgtgtttaatcttcttaaaatgtatcttgtcctacatagttctcagaatacatatggggtatagttaggagataacaataacaagacctaaacaaattgcttatgggagatagcactgtaattagagaatttatttcatataaaataataatataaagtttgaactgattagaatgttccttaaatcatggtttcgtttgttgcagctgtcagctaacatttggttgagctcatataatccaaacctaattgtccaactattgtattgccactattgttaatttgttccttccttactttcttattgttggatcttatatgactgtatgactgtagataatagacagctagctaaatgtagagcaccatttttctcaatgagtttgttttcaaaggctttgcactggagaagatatgtgtagaatttttgttttatttttaaaatgtgtaaaacatcttttgttttatatgcttttaagaatgtagattgtaatttaggaaatggcatatattctgcaaagtggtataatgttgtatatatgaaaaacaggtatatttggtttagttctgtgtttcagtgactgataaacaaaaatgaagctaaaatgaatcaacggctcattcatagttactaaagccatgtcatgactgtcattctattatgaagaaaacagttttatttgagtgctttaatataatgcaacatttaagtcatcttaaggtgaaaagttattgaagtgttcttctctcaagttaacaaaattttacaaatgttcctgaagtgtatcgattgagggaattattttattctagcctgtcatgagtctgtctgagcatgatacttaacatgaacttgatgtagtaggtgcacatttgcctaacaggataaattcagtgatagcccaagctggtcaggagagacagaagtgctggctaggaggtctcagcctcgggcactacaatgtttatctttttctttttgaacaatattgtgaaaatgattgcattctcattgagcatgaaagtcaaaactggaattttctaaagctttggagaaaaggagagaattagtagggcaagatcaaagcatacattggaaataaacagtagaaataagcaaacaatataaagagacacgggaaatgcttctcgtgaagggcaaatgtaacaccataacagtagggaataaactgtgtcccacctgtttacttgtgtttatttgttgttatgatgagtatgcacctaccattttcctttattgtgatcactaaaatgaggccaaggtttaggaggtgagaaaaagtatcccttttacggattcagttcctgctaggatgttgtatcagaatcatgtgagaactcaggaagaggtagagcagaaataaaaaggaagaaaatgtagattagaaaataagacttctgagaaaaagttcaaggaataaagattgtttgactctggagaggagaaagctgttgagatagtttgctaagtttgctaataaagctttattgagtcttttattgaagggttcaaagtaagaaatactatgccatagtgttctccatctctagtgaagacagaaccagagggaataaggatcttttttttaaagacagcatggaaagtttaagatttaggaacttcttgagaaatcttcataatatcttctattcaaaatcttttttttatttttaagggaataaaaattttaaaaattaagagatatacagatgactttttaagggtccttctttccagcacattttttttaaaaactcaggttagaacaaaaatgtcataaagggcactaaaagtaacatttgggtttcactccatatctagaagaatttagctcacaaaacaatttttgtgtgttttgagtaactgatgcataagtgcaatgaataattttcctgcttcactgttatttttaatttaacctggcaaattaagtgagacttgaacaaaattttgttcatcttgaagaatgtatagtggcttaggttatttgaggttttcgttttgaatatatatgttgttattttgatgtagatacgttagcagatggagaggttctaagagattggatactttggaatgtctttatataggaaatagacctcccatttcttaagcaagttgcttctggaattgatgcaacagggatattagctgtagtttaatggataagttgttctatgagctgctgctatcagtacttttttccacattttccattgatatttgtgatgcttgaaaaatccaaacttcacttggatacatttaattttatgcctttttctctctacctcccacttttcctaggcacccttgcacattttgttactgtgaaggactattgccctgttacctcactgataagaaatctcaactgtattcattcagaatgctttaagcttagtcataaactacatttgcctatggacctttggttattttgttaatgttgtcattatatttaagacttattgtaggaagtaattttaaatctatttcataacctgttttgatctgtctgcatactgctatatgttaatttattacggccttttacaattcacttgtcatctgagattgttctagaaactgatgaggaaagagtcgtactaaccaaaatgaatgggcaattgacataacattctatttcaggtttccttgtacttggggagccaaagcacaagatctaaggaaatcttattcacatttgtccctcagagcatcttaccctaagccatagaggtataaatagtaagatgagaattgctcattgtctgactccttgcacagcatgaatttaattctagttggaaacaaagttagtgttgactactggttaccttaaagtattcaccatactatatatttattagaccatctttcctctttgtttattcaagactatgtacttataaaagagaacctataagaatgtgtagagtgaccaaatagggacaaagtgacatacctagagtttgctgctcaaatttttccactagcgtaaccctaaagcagaggggcatgatgaagggggaaggggttctgagagcaaaatcagaatcagcctaccactgacatgaagtgtgttctgtctttaaaatgtaagtgaattttgcattctttataataaaacttttaatataaaaatgatatgtttaatctttactgaaacttatgccaccacaaaggagcaccatgttcatcacgtggctgctcagttttctcccccagtgccctcacccccagtggaggcaagtccttgagctacacacactggctgtagtgcaagatatataaacataggccgggctcggtggctcatgcctgtaatcctagcactttgggaggccgaagcaggtggatcatctgaggtcgggagattgagactagcctgaccgacatggagaaagcctgtgtccactaaaaatacaaaattagccgggtgtggtggcacatgcctgtatcccagtctcgggaggtgaggcaggaga

SEQ ID NO: 691 - DNA, 7549 bp, Homo sapiens
gtgaagctgaagtactgcttcacctgcaagatgttccggccaccccgaacctcacactgcagtgtctgcgacaactgtgtgggtgagtaggaggcagcagggagggatgcagggattcctgagagagactgagtcgtggggatggggggcatcaagcatggggatggcgtgggcagggtctgaaatacccagggctgggcagggggtctggttcacccagatttgccctgactcaggagggcccaggggaggggccctcagcataaccaggagtgttttggcttcagctcaggattggtggattccttcccccagctctgaggtgtggggcagacagacaggctttgaacccttctcccaggcttcagcccggtcctcaagaggtccaagctcccaggaaacagactggaacaataacattccagatgtgtttgggccagaaagaatgagttactgtccagtggcccagggccagctgtactgaaaaactttgatctgattcccagagttgagagggaaaagcatctagcaacagaggcgtttaagctgatgaggtgcagaggatgtcaccactggaaatggctcctgaccctacagctgcctgcagtggttgttttgtcccctctccctgctctccagaggctgtgtagttctgatgggcaccctgagagggtgttgtaagggaaataatgcatgagagggcccaggtgagctgagccacagtgactgtgcatagttcccagggcagtgagctcatcatgccagctcagtactccctaagcaagagaacagcagggaacacccccccgtgacggcatgcagtgaagggggtgactcagtgggcaccattcatccccaaggagctgccccgcccacgccgtgcaaagggcactggccttggcatgaggcctgcaatgggcttgtgacccacattcccacaaggactttctttaccagtctgggtgtgcctccacccccggggacagtgtgcaggtgagctcagccctttgacctggcctgtgatgctggctggctgtgaaccccattgcagctcagcccctccctgggccgctagtcctagagcaggagacgggttgttgactgttagcatgtggttgggatggtagaccaggtgacaagtatttttgtgagtctttgtgccggcactgctctggatcctggggagtcagcatggtgtaagaccagcacagcccccctcgcccatggagcttacagtcaagtagggctgattggccaatccagttattataaataagcataaaaacacacatgggcagagtgtgacaaaagagaagtgatggggcagataacaggggccccctcccctagtctgggattggaagagactttcttaaggaggtggctttgcagctgagacgcgaaggagaagttccagttaaccaggtaaagagacgagagaatgtatcaggcagtgggaactggtacacaaaggaccagaggcaggtgtgtccaaggcctgggagccagctggtgctgcgagagtgaacggggtaggaaagccccagccatgggtgaggccgccaaatgcctgtgctggctgcaggccagcccacactaacccatcgccccttgcccttgtccagaacgatttgaccatcactgcccctgggtgggcaactgtgtggggagacggaactatcgcttcttctacgcgtttattctctccctctcattcctgacggccttcatcttcgcctgtgtggtcacccacctgacgttgcgtgagttgtgggtgagggcagtggggagtggaaggggtcagccagcaagctcaagggtcagcaagcttcagcagtcactgtccctctgagcttgtcctctcctgtttctttctccccaggcgctcagggaagcaacttcctctccactctgaaggagacaccagcaagatatcctttgtcagctagaggacactccagtgggaactgaggtcccttcactgggtgggtgccctgcctcatcctctaatcagaagggaacagcgtacagctcacatgtgtcctccagaatccaacatgccagctcttctgttcacacccaggcaagagctgatcctaaatggggcattgtggggccgggggttcctcgtcttcaggggcctggaaaagagtatgtcccttaagatgccaagctccctggaccgtgtcgtgcccaaggctctttgtgattggaaccctcagttttctctgccgtccatcaccctgaccttgtctggctcttgagtggggtcctgacccttccgaggggcccaggaggtgatcctgctaagaagtggggactgggccacaggaaggttccaaaacttctcagctctctggggaaacagctccatggaaggataggtgagacaggccaggtgtggctgggaggctccccaccctccacccattgaagtccttaactgccctcaccgtgctggagttggtgatctgcttcttctccatctggtccattctgggcctctcagggtttcacacgtacctcgtcgcctccaacctgactactaatgaagacgtgagtaaacctggagccacccctcattctagggcagcgccctcaggaggaggcagggctgagggagcctggggcagccaagcacagtcctgactcacggactgctgggataatgccttttaagcagccagatgcctcccagtcatctcagcttggccctggtgggtccgatgcaggcttctgacacctccacatgcttcattctctcagtgcaggctcccaaggtcccaggttgcttttctccacagccctgcaggaggcagtactcacaccacagcacgcatgatgtttggctggcacatgaccgcttacagaattctttcagttcccgtcatttctttgggtccttttgccaagcctgaggcagaaaggacagggatgttttttccccattcgatgactgagagacatgtcccatgtctgagaggtcacacagctgggaggggacagagccaaggttggtgcccagtcacaggtatgcgctccctcttccacactgcccctgtcagcagcaaagccgtgactattctcaaggtggcactggcctgtcctggctgcccctctcaatatgcacgcctgggggagacagggcacaggccagtgggctccattgaccttccctgcctgccaccctgcagactgccatcaacaagcatgtttgatgtgcccagtcctaggccagacctgacttctcctccccatcctccaaacactaaaaagtaaatgagagcatctgtttcagggcccaccatctgatacttaccagcaacccatcctccaacagaaaatacattcccagacctcatcctctcattcagggaaacaaaacttcacacatgacagggcgttgtgtgcctggtgatcagtgagaacagaaatgccatcagccagtatctcccgcagtagcttcttgggtgccagttctgcagcacattaccagaggttaaagagaaaggagtgtgtggccaaataagtgtagaaaactctaggttaaagtcaaggtattctttattgctaaactctccagtgccttccatagctgacttcacagagctagagaatctggcaagaattaatctaatgccctagcaatgtcatctgagaattagtattattttccctgttttccaaatgaggactcaggctcagcgaagtggtgatctgtccaggtaacgtagccagtgagtagcagggccggggctcacaggcaggtcagccctcaccctgtgcccctgcgctaccctccttcagaagtggctggccggagaagggaggagtcatccgaaacgtttcctctggatgcttctcttgggctctgctctgtcatctcctctttggggcctcctgatctctgccaggggtcccccacattctcattgaatggcccacatgaaagacatgtcgccttctgtaaccagaattggtttcggaattgtccagttgtccccagcctctagacctgcctcctagaaaagtgaagcaaaaggaggtacttgacctaggcctccttcctgcttgcagatcaaaggctcgtggtccagcaagaggggcggtgaggcctctgtcaacccctacagccataaaagtattatcaccaactgctgtgctgtgctctgtggccccctacctcccaggtaagtgagcggggtgcggaagaggggtaacagggccatgcctggccagtgatcaaagtgttcctggatatcagccgacctccccctacaccctagatgccctccgtccactaccccctggagggcatttgtcatgtgacggaattccatggagaattgttatttaatcacgtgctcattgtagaaaaaaaaaattaagtacaaaacgtaaaacagaggagcattggatatgacatgtaattctactccccgggggtagccaccatgactgtttcagccatgtttgaatgacactgcccttccggttgcccactgcctggactgggtggcgactccatcctctcctggcagtaggaaccctggggactcagccctgctgggtcactccctgttcatcctgacaccagggggcaccagagttccagaacggggattacattgctgtgggtactgctaagacaagtcattcccacacagtcatgtcacctaccccacccagtatccctgtcacccagcctgcctagaggggaagggaacataggaatttcatagtcatcaaatacctattcatccttgctttcctccctcacctgcagcctggcttcttggcagccagacaggtgggccagttggaattaatagtgaataaattctgtggccaaaagccaggtggccagagggcagagagaggcctgccagaggtaagagtcttgggcccccagatgggcagcagctctcctttcctcagcctttctcagcctgggcctttccttggctgagatagactctgccgtccaacccctggcctagagcctcagtgttgggcagagccctcatgtgtctcccttgtgttttggaagcctaattgaccggaggggatttgtgcagtccgacaccgtgttgccctcacccatcagaagcgatgagccagcctgcagagccaagcctgatgccagcatggtaggaggccacccctgaccacggctcagtacttgccacctgctggcctgtctgaccctccgcactcacctgccgggaccctccctattccatccaagggaagcagaactgccaaagactcaagtcttttcatatttatttcccatcctgcgtggctttccctgaactgttccgtggctgtgccctctgctccccaaacccaggttcccacagccttgggccctaggtaccccagctgatcagtgccaggagagaccagagcctctggaggctacccaggggaccacaccaagtccttgcctgtgccgggcgagccctgtgtgagtgaggctgtgaactgagcgtgaggcctcccaggtgggggaactgcttgggccttgctgagccagggtcctcagggtgaagcaggactgaggagtggccagctctggatagctggctgtggagaggaagcctccatgggctgctttggtctgtgggctccttcattcccttggtgataatttccctttattctgtgggatttttggtggggttttccccccttttttatggagttggccaataggattgagttggggctccagtagagaaggcagggttggtggtgggtgggggcagcctgtatcagacaaaggtaaatcagccagccaggcacccacagcctcagctcctgtgcagttcctgggcagcacagtggaagtgggagcctggtccttcccctgcccatggagagctctttaagggatcccagcctgcccctccacttctctcccaagccaggtcccggcatgggtgggttatgctcatgctggcaatacttgaaacgggtttattaatgctgggtattttgcacaattttatagacctcttttctacatagtcttttttaaatggaaggagaaaatgtcagccacattactgtctgtgtagtgccaggtgaagggttatcagaaggctggttggttttaataagtttattccaagagaccttctggctggaatgagtgagagtgtgtgtgcatgtgtgtgtgtgttcatgtgtgccctgtatgaatgtggctggctcccatatcccctgggctgccccctgccccatcccctttgagtgtcagaagcactctgagccaaggggacagggggcacgtgcactggtcacgagaaaaccctgggctcccactggggctcagcccagcctcctatctttccttcttctatggacttcagacagccagtgtctggggactctgccactctacccccagccctacccaccagcccccaggtgaggcttccagctgggacctgcccagacaggctgagcctgggcgtggtgggtggggtgatggctctggggagcggctgccatcctacaagccacaccccctcctctgagctctgaatatgggacccagtgccaggagctggaagacaaggtgtttctgccaaacggggacctccatccagagaaaaggaagaaggtgcagggtgggccaagaggcaagtgaaggttggcctgagtctgggccggaaactcagaggatgtttctcctctgctgggagctgtagtttcttatcaaaatagatattgttccaccatccccctccttggcccttcaagtgggctgaagcccttggaaagtgacataggaagtccccagatcttgcccttctcactccagaggctagtggtcacagacagctgggaatggcagccacagagggtcccctctgggagaaacagcttcaccccagcctcagggccctgggccatcactgcagtggccctgggaggtgaggaagaagctggctagaggagggggctcccacctaccttttatttaagccagtattctttgttcctgcttgtaataaaacttcagtttataagagttgctttgctttggtttggtttttgtttgcttttcctttgctgaggccccaactgggagccctctgttctttcagacaaatttggttctttcctggggagactgtgagaaggcaggcagcccagtgatctggctacattttccctcacctggctggagctctgtccgctggaggaagagcagagagggctgcggctgagcccccatgggcacgtgaaaagaggccatcctgtcccctctttgtcccctccaccttcccctgcctcaggggcttggagacccccaaattcttcttccctactgcctttccactccgatccccaatgagtgcccagctaagaaaatgtttgagacagtagattccagtttgagagccggagcttccctggctaccacctccaacctgggcaccagggcccagccagacaactcataacactggcccacctctctggtatctccctcaggaggacacctgtcaggattttgccatctcctgcacagcct

SEQ ID NO: 692 - DNA, 7549 bp, Homo sapiens; identical to SEQ ID NO: 691

SEQ ID NO: 693 - DNA, 407 bp, Homo sapiens
ggccttagagcctgcccctccaccccctcagatcaggcatagccatagtcaagcccagcaggtttcctcaggagctgtctggggtgttgatggtggatgacgctgctgaacaagtttggtgactgttctaagcacaactggcttgatactgttcccacggcctgtccacctcccacccccaaccctccaccagagtaggtaggatgtagggagggtgcgtgcctcctttgctctaggcactgagggaccaagctagccgtgcacagccccatacacttcaggggactaaaggaaagagctgagccaaggaaaatcagctgagcccagggctgggggctgcttgtctgctatcctgtaccttttttttttttaaccaaaataaagattcccctcttcttgccatacca

SEQ ID NO: 694 - DNA, 118 bp, Homo sapiens
tctctactaaaaatacaaaaattagctgggcgtggtggcacactcctgtaatcccagctactcgggaggctgaggcatgagaatcgcttgaacctgcgaggtggaggttgcagtgagc

SEQ ID NO: 695 - DNA, 407 bp, Homo sapiens; identical to SEQ ID NO: 693

SEQ ID NO: 696 - DNA, 118 bp, Homo sapiens; identical to SEQ ID NO: 694

SEQ ID NO: 697 - DNA, 873 bp, Homo sapiens
agatatggtagtcttcctctaacccccttttgcagaacataaacatttctcatcctctgttcatacaattttttactttagtcacatgaaaacattgtgagaatggaatcttgttccattaacgttaaccttggtggtgtagaaattaggacatgaagcatgtcactttcagtgtaaaatatgtcaaggaacttcatttctttcatcaattcctgacaattgctaatgtagtaatgcactttagttgctttgagcactttgggctggtgagaagggaaatacatagtgtctttgttaaaagaatgagtgaagagaagagaaaattttaaaagaaattggtgaaaggaaaataactttggcttttttattgttatttttatactgaagtagacaaacaattgttcctgttcttcctgaaggaattgttgtcacaattttattattattagataattacctaagcttctgtgttacaagctgtggcctcagttctaggtggtggtgcttgagtgaacattttacattttgttcctgacagctggccagcattgtgtttatattggcatggaaaagagatatctgattcagagaacagtgttttccaaggattgtgactgaagacttccttaatggtgtaataatgtacctcctcataaaaacaggtttgacagctgtagctcattttttgttgttgaaggaagttttatttgttttgtttttaactacttttaataaagaattgagatccagtgtatgattaagatttgtaagaaattgcagattccttaataaagctcgcatctacagacatgactaatcattgataataataaatgcaaaatattttaaattattaggggtagagttaaaaaa

SEQ ID NO: 698 - DNA, 873 bp, Homo sapiens; identical to SEQ ID NO: 697

SEQ ID NO: 699 - DNA, 427 bp, Homo sapiens
ctttttttaaaaatttcttttcattgttgttcactgttcaaaaggtacatcgccaggttggatctttttatttactaatgtaaactgaacaagtttgaaggtggttgtcccctattagttcatcgtgccccagtggtgggagctatagttgtttgagccatggtactgtctttggtcagggcacactcttcatttctaaaccatggttcattgctttgagaggctgttattttagtgttagtctttgaatattggtttgaaaatattacagttactattttttatgattggtattaggacttatggatttgctaaaacaaaatcatcttgtctcaataacgttttctctctttcccaccacattcttccttcctgaattttaatatgtgttataccacatcatcagttatatcttgctttccaggat

SEQ ID NO: 700 - DNA, 427 bp, Homo sapiens; identical to SEQ ID NO: 699

SEQ ID NO: 701 - DNA, 9800 bp, Homo sapiens
agataatgcaaacaggattataaagacaacattgcaacaaggtgaacatttatttgtctgtaaatttgaagcatttatgtaaggcatttagatattcaattttttgtttgtttgcttgtttgttttttctggtccctgattcagtatagatattcaattcttaagtttctctgagattgatttaaaaaaatccataaaagagattgatcataaacccatatgacagattgatcatgtcatttttgaaatgatttgttgcatgattcaatggacataatcaaaaattaggaaaatatatacattatatttgtcagaggaggctccaaacaccgtatttactctaattctaatgtagtatgatatttagttttagttcaatcatagtccagagccacacatgctattttaacaccttccagatagagatttagatattttgagtcttaactttatttctctgatctctaatcacttgttaatctaatcaacattgtgtggctttagcaagtttcaccaaatattcccttgaatggatgtatgtctctgagttgtcagcagttatacatgcaaaagtaagtagagatatttaaaaataaatatctagcatgtatgtgtatgtttaattgtgtaatttaaatcatatcatttattgtttttagctaaaaataattactttttcacaaatatatcagcacaagaaaaaatgttatcaatggatcagggaaaccaacgtccttttaataaaggcctggaaactgatttggtccaattgtcagttatggcatttacatttcaatgagaaaatattgaacaaagagattaaattgtttaactcaggacatgaaagaccgcaacatgaaagaccacaaaattcaaagtgcattttaattttatttattttgatttatttatgtgggaaagagttgaaaatttctgtgacacattgataatctttaggctcaattcactgaccagaattggaatcaaaatgtataaaataaagataatagcaaagtttgtacaagaaacataactaaatgtacttacaattttaaaaaatagattcctataaatattaaaataatcttgaccaaaatgtttagtactttaattaaatgaaggccttatctgtaatatcaaaatggcatatttataataaagaagtttttgtctacaaaggagaataaatatttttgtgaaagaaaataccaacctttaaatattaggaccttttaccaaaaacataaaattagagaaaaattaaatacaggtactatttttaggtaaaattatgctataaagtgtatatttataattcagaattcaatcattcttatctcatattatatatgaaagttagagaataaagctgtgttcacatgaatgttaaaaatgcttacatgttaacacctatttgtaacaaagacttgatcaatttcgagtgaactttgtattatgcttcctagcattggaccattataaagagatttgagatttaatacaatcccttagaaagaaagtttggtccaagacaattcccaagtattcaggcccaaacaaaagttgacagtgataatgctttagcttatccagtctgcattctgtgttactcaagtgcaactgagcaccaacttagagcaagggttatgtatgcaaattcaataagaaggttaatttatttacctgaagaaaatgggaaattaattttttgatttgcaactgtagtttaaactgcaggccaaaaaaagaattattttacatgtgtccattttcaactttgtcttcacataagttcatgtttcccaatgtagtttcatatgaaaaataacaactttcagttgtacagtttattgtttgttgtggttttgtttgtttatttttaatttttgtgggtacatattaggtgtatatatttatgtacatgtataatttcttaattatacttatcagcataattttttatacctttatgttttttatatgcaatatttttcctccatccacttttggcaaacataaagttcttgtatcctctgttcagatcatttaaaatttcataaaaagtacacattaagactaaaacaaatcatatgatagtaattcaatgtatttttaccttataaaatgttataacattttaaagaattgttttattcctttcccccacatattattacaattaactaaaaatcataaaaacattcatttgaaagatcaagaggcaatacagaagaaacaaagttaactttcaaattaatacattgaaaagttacagaaaatagacttttaaaactatattatagtaggaagttttacttaataaaataacttttcaataaggagtttgttcttttgcagatctgcaactgttgcagaaatcattaacattattaaatacatgttcttttttattgtaaaatacttgtgggtattgcttccctgacatagaagaacaagttgctttaagatgaaaaaaggttaccacagttcagttttgccaatatggtaatatacttgcaggaaaaaaattgagaaattggaattttgttctaaaaattcaagcccaatacgcctgtgagcataataattttgaaaattagctcacttcttttcacagtgcatgcatgtagacagagctggtgatgtagatcacagtggcacaacttttatgacagctgtgtttagcctgctttggagcactatcaaagaagaagtattagtcttttgcaaaagcctctccaatccttgaacatgtatttcctttctgcctctgcattattgaagtcattccaatgacaagaagaaggaaaaaataaaaatgacacagcagtaaaggatgtcctacctagtacagatattaattcccgcataagaattcaggaacttctaaggctagccatgaaaacttcctacccctcaaatattctttttcaacttttaaaaatttaaaccattcttaatggagcaacgcactacaatgcttttcctgagaagccaccctcaatagcttgaaatgttcatagaccttccctaaatgttaatacacatgaacatattaaaaataattaaaccacatttttgccataatgttttgtaatttcaaagcaagagtggtacatggtaaaataatcttttattccttaaatttgtaaaaaaatgacagttaattccctattaatttactatgagaaatttagaatttgaaatgccaatcccaaaatatggtagataattttaatagtgtatatttatggataaagttagatttttactttttaatttttatgcttactccttcaataacttagccaggtatttataaattttattaaaatcagtaatttatttacacaaaagaatattgctttctgacatttttataatttctagaaaagccagatttctgctttttggaagaagatcctggaatatgtcgaggttatattaccaggtatttttataacaatcagacaaaacagtgtgaacgtttcaagtatggtggatgcctgggcaatatgaacaattttgagacactggaagaatgcaagaacatttgtgaagatggtcgtaagtttatttcttatttcattttagttcatttataggcatccttttaaaactaaggcatctcagatggcattctatactcaggttttgtttgagccatgcaaatgaagatatatttgtgtgcattcaatgtgagatttgtgactgtagttttttaaaaagcacagaaaattaagaaattattttcatagatctaatactttttatgttgcattatttaattcttcttcctgagaatactgcagtacaattttggcacaatagaattgctgaaatctttcacatttatacaaatatgagagcaaacagttactgaaaaccaccacctaaagtcactcagttttatctgcctataacatttattaaagggatgacttaaacattaactgctacgcttttttgaccaagaactacagttactcatggaaatattaccttacaattatatttaaagattcactgtttgctaatttaacatagcaatgtgaatgaaattgccagaagtctgcttttttaactgttgtacgcttcatgagtccaaatatgagattgtgacaatgtttatctattttaattggctgtatttttttccagcgaatggtttccaggtggataattatggaacccagctcaatgctgtgaataactccctgactccgcaatcaaccaaggttcccagcctttttggtaagaatcttgtggattttattgcttccaggaaactattatcatgctaacaatgaagtggattgtgtattagaagtatgtctttaaatatatatatatacctgcgttgttgcttaataatgtgtttgttgaaatactgagattcaaattgtttaagacatttaatctcataaaagcaacaattttcctaatctattttaaagtatgctttgaagtaagcttttgattatgtatcacatgaaaaactttcatatgatatttaactctatgccaaatttattttgtaaaatggtgctaggaattatcagcctcagtgtaagatggtaaatcattgtactggcacagcagtgcatcaaacgcagtctaaagtgcttttaaagtcagtatgacactaggcaaggtctctggtgttactcacaggacagattagaaattgattgaataaccatgcctaaatgttatgtcactctggagggaattttcttttgaattctgcaggactcttttttatgttcttgtctgttaacctatttatcagatttaaacgaatatacaggaaatatttccacaaaatgcagagctgagaaaatagtgaaaatactggaaaacataatcaggaaccacaaatatctgggcagttagaaataacataaacagctaaaaattaccagtgtaaaattgttagatcctagctaaattataaaaatcacatattcttattcagatattgaagattttgtttagaagtagtccatgtgaacatgtcaaaggtaaacttggcatgtttatatataaacttagcctgagtgtgaagaattctgtaactattaaaattgcaatcttaggattaaaataataataaaaaaaaaagaaacagtgtttgggccaggaattctctaccttggccatttatcagaatcagattggctttgagctactcctctttacaacaaacaaacaaacgaacaactaagcaagcaagccaacagaacgcaaacaaaatccctgcccacgtggatttgaagcattaaaatgttgactccgacttttctagaaagagtctgtgaatgttcagctgagtcccacagtgatctaatcatttgtgggtcttgcttcagcactgaatgtcacaccttggaaatcacaaggaggatttgaaacatgattaaagaggaaatgaaaagtgtaaagagacatgagatctacgagggagcataatatgtgcttttaataactgaaacactattatgtgaaaggagaattaagttctctacatgacttaccctttagtcctgcctatttcacaccctccccagacccccatccccatcctcccttatccccctcaacccagcctaagcatgaggattaatgtgtgagaactaaagtataaatgcctttctataatatgtttctttcttatgtgagatcttaaaaaattgatggctgtctcaggtattaataaattccctaaattgtaggcattcaataagtgtgcaattaacacttaagaggtcattaaggggatgcaaactttcagtgggagttggaaaatacgatatattcaaaatgacttcaggtccttacattcaataggtagagcagtgaattgaatgccagatgaacttgagtctaatttttaaatactacttcgttcgtaaaaattaatacttttgtgattctgacttatctgaaaaattaagtactatcgttgcattatttctttatgtctttccagctttgtatttttcactcgtattttgttttattcagttattatattttcaaaagcacgttaaatcttactgctgtaaaagaaaatttagaatgactaaattaacaggtttaaatatacatgtgacacagtatatcagtaagtacaagaaatgtatgaaatcagtttgcaacatgcttgaatacttttgtttgaattattttaccaattcaagtggagatctgcagtcatttatcattaaagtgagtagagtaggttagggaataattttgccttaagtttttttgaagtataaaatttaaaatttttggtaagcatactaccaagttagaaagggcaaaataaaaattagtgtgagaaagtaatattaatgagttttaaatggcctctgatatgtcttctttagtttattgtgtagatgcacattgaaaattgtaacaaataaataaatgcttgtaaaagtaaattattaactaagcagtaagaattgacaacatgaatttaaaagaaaacaatattaacaataatttattcagaataatagacatttaaggaataatgttatcgtaactgcatttaaaattagggcaaatgtctcctttatttgtctaaaaaactgttttatttttgattgtatatattggcctcaaaatcaacattcctccggccaatttgaccccttttcctttttctaagagcatttccttcccttcccttccccgcccctcccctcccttccctccctttcttccttcctaatctaaaacatgaaacaatgttgcagtaactaggagacatttgatattaaggatggcataaggtggattgtcaatgaagctatgttgccattcttcttaaaacctacgtgatttcgaatctgccccagccaagatgcggaagtgggaatgcagatgtccctgtactctgttctaaaacctagatgaccccttgtcacttctgtctgaggggtttgctgagatctacagacacctcttaatttccccaatcaaatataattacatctgtcactgcttacaattatattaatacattctattgtagtttaagaaaatgcaattctttgtttacataaaactttgtttttcaagggttttatcaaacgtgtaaagttctctgtggtatcaggttattttgaaaagctgtaaatcctttaaagtttcaattcaatgtacaggaataataatctgccccacaacataaatggaataccagtctttaaattctttccactaaataacaatctttaagtagagtatttgaatattctaaaattcaattattattaagtgaaatatttataaatataattttaatgtttttcttcatgatattatggaagcattttagaagtttagttaaacattatcataatatgactttttaaaaattgctatttatttttaattactggaatgttgtaaatggctttcaagatatatttttccagtaagctttcttgattcgagatacttgaatacttactaagcacaattccggtgtaatttttctttttatttccacatttcaatattaacaagttatttaggtaatctcaaagacagtcttactcttccttaaagagattttaaataatgatttgtaagcatatccctgagcgtgagtgcattatttcagtttgattggctgtgttgagtatatccatgtagttaaaataaatgtgtgttctctccacctgaaatatttctaaagcaatttccctaaatgtgtgcaattttgcgcataaacgctagaactgaaagccatcacaactggttcttcttgatttcccccatgattgaaataatgatatagcagataaaaaacctttgagcctgaagacatgcgttaaattcccaactcttcaactaatagctgtgtgaccctaagatatttcttaacctgagtttcatctttccaatgtaaaatgaggatggtaatattatagtactaagttgataggttgtgttgtgaggttaaatcagtcaaaatacataactttcttaggacagtgcctgatatctagtcagttcgtgtagggttactcattattattatccatgtgattcagagtaatacacttaattcaccaggccttagattctcatttgttaaacaacttctttgtaagttcccatttgcagaagaaatttatatttcagacactcataaagtctctggttattcagataaatgcatcagtaaatatacagtctcaaaatcatgactaatattttaagaagaattcatactagaattaaattaatgcatatatggaaactcgaagagtttgaatgtgttcattagaaacaagttgagattattgtcacagaggagtatcatggggcttcaaggtcaaaagatgtttatttgtataattgttctttatcttttcgacatttccaactttccgaactttttgagttcttctactgtttttctggttattccaatttgaatgattagtaattttctttgtatcacttatattcttccagtcattcattaaatttcattgctttttatgaaatgtttatttctctctcttccattttcattcctatttatttcattcagatcatcaatccttcatggttagattccctaaacaatcatgtcatccaatttggaacactaatgatagttaaagagggtgctaaaaaattaaggtatatgtctattttaaatatatgtatgcattgacttaaaaatggaattgtcgttttggtgactctacaaaaatagttttatatttaaaagtatttcagtatttttaaatcatatatatatatatatatatatatatatatatatatatatatatgaacgtgatatccccccaaaataagcataaactaataggggcttaggcaaaccaggctgtatagacatgagacaaatagataaataaatagatatcagaaagctcagatatgactcagatattgtatataacacataatgtaattatatatctaacataagtaaactaaagcatattagagagagagagacaaaaaggaacagtcatatgtaacaaattatacatgacctttttgacatcactgtcctatttctagtcatcgatcatgtggtaatttagcttcatccacttgcctaaaatttgtctgcattgtccactagtcctctatctattgcagatattttctgtcccttaaatataacttttttccgtccattcaaattggccttttcattatcattaaacacaaattactcactcttattctaaaggatgttttatgttattttccccacctaaaattgactgaccctcctaatcttcttaaccaatctgccttttcactaccataaggaggccttctttctgtctctctcccctggcttcttactatgattccttcaatacttgtactattagatattgtgtttgctctgcctcactgtctagattacaagatttttttgaagaaaaacataatgtactatacagtttatagacttcccccaccctcagcattgaccacagtgttaaacatataaagatgactcacattttttatttatcaattttgtgatccacagttacaaaagaaggaacaaatgatggttggaagaatgcggctcatatttaccaagtctttctgaacgccttctgcattcatgcatccatgttctttctaggattggatagcatttcatgcctatgttaatatttgtgcttttggcatttccttaatatttatatgtatacgtgatgcctttgatagcatactgctaataaagttttaatatttacatgcatagtaaa

SEQ ID NO: 702 - DNA, 110 bp, Homo sapiens
tttttgagatggagtttcactcttattgcccaggctggagtgcaatggcgcgatctcggctcactgcaatctccgcctcccaggttcaagggattctcctgcctcagcct

SEQ ID NO: 703 - DNA, 964 bp, Homo sapiens
gaggactgactataccctggctgatctgtgggcaattgtcagaccaagaagtctgggctgggtccagtccccgatggagccactgataacagaggcaccagcttcctcctggaaccagggtctctgagggccacagaattgtcacgtctccctgagtctggatgcagggcacccaacaccctccctctttctggggtttgggtctcctaggcccaccctttctaggacaggagccgctacctctgggatggactgcgtgcctgtgtggggcaggactgcccttgcgaggagggcctggcccaggagcaggggcttggagtggggctggtgcccgggacagaagtgggaaatagatgggggccccaacaccgaagctgccctcacccctccatcagggctgatcgtacatacctccctcctcggccccctgagattggtatggggcacagaaggcagggggtcacccccaccctattctgttctcttctcccagcctcccagcatgtgcctggaaccttgctgggaagagagagctccccctccactccccaccccatagcctgagccttccagctgtcaagtttgaaaagaagccaccgtgcctccagggcctcctgcaccgcagagaggggctctctgctctgggaggctgctcagcgcctctcccacggcctgcactctcctttcccttaaatgggcacagccagggtggctggcatgggactggcactctgtacctccactccgtcaccagggacagccccgagggggtgaggagaggggccttgctctgcaattcccagagccagatcttcctcatccaagcaataacgggacgagggagccagtggccaaggacactcagggacactgttggggcagcggccccacatggtaatgttttctttagagagaagaaaaaacaactggctgtaaacgtaaattatatttcttggagaaagaa

SEQ ID NO: 704 - DNA, 1207 bp, Homo sapiens
cccgggctctgggcgcccccgggggcacttccgcgccctggaagccgctccaggactgggcacctgagcctatgttctggctgatgggcttcagcactcctgagaggaggggctctaggaagctttggctggttaggcctgcgggactggtgggtccctacttaggtcaatggaacggctacttttggcgagttgccgggcacaggcagggctggggctcatcttcagacactcctaggtagtaagaggactgactataccctggctgatctgtgggcaattgtcagaccaagaagtctgggctgggtccagtccccgatggagccactgataacagaggcaccagcttcctcctggaaccagggtctctgagggccacagaattgtcacgtctccctgagtctggatgcagggcacccaacaccctccctctttctggggtttgggtctcctaggcccaccctttctaggacaggagccgctacctctgggatggactgcgtgcctgtgtggggcaggactgcccttgcgaggagggcctggcccaggagcaggggcttggagtggggctggtgcccgggacagaagtgggaaatagatgggggccccaacaccgaagctgccctcacccctccatcagggctgatcgtacatacctccctcctcggccccctgagattggtatggggcacagaaggcagggggtcacccccaccctattctgttctcttctcccagcctcccagcatgtgcctggaaccttgctgggaagagagagctccccctccactccccaccccatagcctgagccttccagctgtcaagtttgaaaagaagccaccgtgcctccagggcctcctgcaccgcagagaggggctctctgctctgggaggctgctcagcgcctctcccacggcctgcactctcctttcccttaaatgggcacagccagggtggctggcatgggactggcactctgtacctccactccgtcaccagggacagccccgagggggtgaggagaggggcctgctctgcaattcccagagccagatcttcctcatccaagcaataacgggacgagggagccagggccaaggacactcagggacactgttggggcagcggccccacatggtaatgttttctttagagagaagaaaaaacaactggctgtaaacgtaaattatatttcttggagaaagaa

SEQ ID NO: 705 - DNA, 440 bp, Homo sapiens
caggcctggttctgctattgaccaagtgatcttgagcaagtcacgacccccctgggccttagcttcttcgtctgtacacgaagagttgggtttatttatttatttactttacttttattttattttccaagatggagtctctctctgttgcccaggctggaatgcagcagcatgatcttggctcactgcaacctcagtttcccaggttcaagcagttctcctgtctcagtctcctgagtagctgggattacaggtgtgcaccaccacgcccggctgatttttttgtatttttagtagagacggggtttcaccatgttggccaggctggtctcgaactcctgacctcaggtgatctgcctgtctcggcctcccaaagtgccggaattacaggcgtgagccactgcacctggcccaaggaattgggtttatttagatctgat

SEQ ID NO: 706 - DNA, 440 bp, Homo sapiens; identical to SEQ ID NO: 705

SEQ ID NO: 707 - DNA, 9129 bp, Homo sapiens
agccgctctgttcctgggcctcggaagtggtgagctcgctgaggcaggaggagctctggggagggtctgggaatgtggacgagggccctgcaggccaagatggggcagatggagggaggaagatgtttgcgctccagatggcgaagaaaattccagggaagggagaatcactgcacagagggctgacacacaggtcctttccagagacagctgctcacactcacacccatacacacacacacacacacacaaaggcagatacagggaaaaggcagcaccattcaggcacacctcacctgtcagaccagccagccctggctcactcacctggaatgcagtatttaaagaactcgccatcccacctgcacacccacgtagagacatctccccactgtgtttcagatgcctatggcgtcccctcaaaccctggtcctctatctgctggtcctggcagtcactgaagcctggggccaggaggcagtcatcccaggctgccacttgcaccgtgagtacctctgggaccggagggctaggagcagtggaggttctgggtgggagcaaagagctgagtggacggtggggcaggcagcaccctaaagggccccacactgaggcacaggcaacgggagctggggcgaggcaaaccttggcagaggcgccgtctactgcttgcctatctccttctagccttcaatgtgacagtgcgaagtgaccgccaaggcacctgccaggctcccacgtggcacaggcctgtgtgggccactgtgagtccagcgccttcccttctcggtactctgtgctggtggccagtggttaccgacacaacatcacctccgtctctcagtgctgcaccatcagtggcctgaagaaggtgaggagggcccgggcccggtggatggacgctggggtcgcgggaagaccagagagatggagatcctagacagccctgagaaaggggactgcagcacggactcccctctcccgcaggtcaaagtacagctgcagtgtgtggggagccggagggaggagctcgagatcttcacggccagggcctgccagtgtgacatgtgtcgcctctctcgctactagcccatcctctcccctccttcctcccctgggtcacagggcttgacgttctggtgggggaaacctgtgttcaagattcaaaaactggaaggagctccagccctgatggttacttgctatggaatttttttaaataaggggagggttgttccagctttgatcctttgtaagattttgtgactgtcacctgagaagaggggagtttctgcttcttccctgcctctgcctggcccttctaaaccaatctttcatcattttacttccctctttgcccttacccctaaataaagcaagcagttcttgaatttctctctttattaagtctacccccagccacggaaagaggagtagaccatgattactgtgaacccccccttaccccaggacactgtgaatctcttcttgcctgtgccctccccctccccctgcccaataaataaaaaggggacaaggaagtacacagcgagggaagggaggagtgtgcacccaggacagtgtctgtgtagagggtgagctgggcgagaataaatagaccatggaccccatggtggggataaggaaggacctcgcatggccaaggcaggggcaggcgaggcgctgagtgcccttgcccaaggccaggagcagagggtgggagcccgcctgcagctggagcctagctttgcggggcagtgggaagatccctgatggcagcttcctggtcaagcttgcccttgtaaagtactgccacgaggggctgagcattctgttgccaagacccaccattgcctctcctcgtctccccccagtgaaagctgggctgggcagggagtcctcagaagccactctggcaaggccaggggtaggtgtgtttctctctgggcccctggacaggagaagggatagagggactgacagctctgggtttagcttttccccttctgaggtgctgtctagctctgacccccactggcggccacctggggtgtaagccgctggaggggggcctccttggccccctgggtccccctgtagccggcgtagccgcagctcctccagaccttgccataactcctgacgctcctgggccttctgctgctccctggggagagagggtgaggcagctccctttcctggggccccccacagtccagactccctcacagtccagactccctcactaccaccccaccggcaaagggaaggcatggaaccatttttgttctgtgactccataaaaaccctctactgagggaagagagcagaggacagacagatcccagcctgcagtcacagagaagatgacgggtggggcctgagtggttctggcttctgtaggaagctacagggagtcagaacaagtctgagctactcgaagaatgacgggaggatacaggggcagacagtcaggcataggatggcaggagcatggacagtcttgcagcatctgatcagacagagtttggggtagtcctcgggttccctccagccatgggggtctgactcctccctgctcttctcccttcccccacgcccagcccccaacactcactgctgcttttccagcttgtaggaggctgtgagctcatcaaacagcttcccattcatctccatgaaggtcttgagcacattgtagatcagtgatacgatggttcttggcagtgtcaaggagggatgaggagatgaaacagctttggtttgcccacctctccctttccctgcccttcacatacagcattccacctgaacacaagcactgcccactttcctgtccttttcaccacccctgggccatcttttgatgctttctctgatattctccagctaggagtaaccctggggtcgggtctggactggctggccctggtcccagtttctgtgagttaggtcatggcctggcactcactggttccagtgctccttggagacttggtagagggtcccaaacacagcaggcagcacagtgtggcagttgtcctcaatgaggcttaggatatactcattgttccagaaatacagagcccgctctgcaacctggggcagacaagatggcagagtgattaactggcagtggcttctctctgtgtgcaaggtctggtgtccatcactacctcaacgcccaggccccctgaccttcacacaccccaccttcagggcttatctgagccctggaggaagcaacagtgttgaagggaaaagagttctagatacggaatccaatgctgcggggtgaatcctaaccactacagactctactatgccatgtgaccttgggagaggcatttaacctcccagcctcagttttctcatctgtaaaatgggctaataatacctatctcaacaggatgttataagaatcaaatgagatactagacttttaggtgtttaatgaaccgaagtgccagaatcactgtgaggaagacttgacttccactgggttatggcccataagaacgggaggaagtctgcacatgcttgcagcagaacatgagttagttagctgggttggtgcggggaagcctggctgcatcccaaagcgagtctaatgaaatctaaggccactagcaaaaggggaaaagtgataacagtcctccatcacattctggatcacacttcagtttaccaaacatgtttacactcacaatctcttccatccttatccccaccctgtgaagaggttgttggcccattttacagctgcggaagcttaatcagaatcagagtggtgcagtgatttgctcaaggcccctcagccagtggaaggcaggtccgaggcttcaccctaggtctcctgaccctaagtccagcatctccccattaccagacccgggattggaggagaaactgagggcaaagggagctttattaggtcagctacccaacctttccaggccagccctgctcccatccccgcctgtcctgcctcatacctggaaatgggggctggaaacacagcgagccacctgcttaaaaaggggctcctggatcttcacaaactgggagggctcgatgacatcaagaatctcttccatctcccccagaaacatcacctgggtgggttggggaggggagtagggacagaggggcagcagctcacatctccccctacacatacacacacctgactgccttctagaggccgagccctcccagcctccctctggcgggcatcaaagcccttcttcatacctccttctgggtgcaggtttttggccagtatttgagcagcccccggatcacctgtgggagatgagacaggagtcacgcctgcagaggtgagaggctgccttagcccccagaggtactcacgtgctctgtcagagtggcatccttctccaggaactgcaccacacagtatgccagctgcagggggtgacaggtggagggaaggaagacaggtcaggaaggcaccaggcgccaaggacttgctgtccaggacagaatgccaaatactgctcacccacggcctgttactttcttattcaccaagcatttatcacctgcctaggatgtaccaggcatcacattcagtgtgctgggaatacaactctgatctcgcggggagtggggacagtcaacaaactcatctttataaattttgcaaaaggttccataatatggctagtgtggtggctcacgcctgtaatccaagcactttgggaggccgaggcagcagaatcacttgagcctgggagtttgagaccagcctaggtaacatagcaagacactgtctctacaaaaaaaaaattttttttaattagccaggcatgtggcacatacatctgtggtcccagctactcgggaggctgagaagggaggactgcttgagcccagcaggtagaggcttcagtgagccatgttcataccactgctctccagctgaggcaacagagtacggttttgtctcaaaaaaaaaaattgtgtatcaaaatctcccataatagatttgtgtatccaaatatttgggaatatagatggagaagaatgtaattctgccaagggagggtagagaagaaaagcctggcttcacagagctgatatctgaggttagccttaaagcgccagtgggaattttctaaggtagatggaacagaattataaagacaaagaaggtgagataggatccctggaggatctgacctccaggacccactggctgccctgactgtctggagctcctgctgcagcagggacaggcctgggcctcacctgggcatggaagacagacagcgacttgacagagtgcagggggatcaggacgcgaaccaggaactgcttgtgctccgtcttcaggggcagcgcaaagccattgatgatgctgaggaggaggcagaagagaggaagagggctcaggtgacctggccccagtccctccttccagaatcctgagctccagctgaggcccagggagaatcaccttcctaggatctccagcagctcagccacaccattgaagtgctcgaattcatagatgaacctgcaagagaagaacgcaggtgggctcaaagcaagcagggtaggcccagtgcccccttaggcatcactgcctgcccaccctcacctgcacggcacgctcatcaaaaatctccccaaccagaggctgcgctccttcccaacatccaaacaggcccattgagatccccgcccccccacactgaaatgccttctcagcccagccacctctgccactgagtcccaagctcaaggctctcttgccagtcaaccaagagaatgacaaacacttagcacatctactccgtaccatgtaagtctcagaattatccagggagatggggcttaagaaatccatcacatggatgaagaaatcaagactcagcggttaaataaaacaaccccaatgttaataggcagggaatctaatgaactccaaggtgcaggaggacagggatcatggctcacccattttgtagctaataacaactaatgtttcagagtcccggcctcagtccaggagctatgctgagtgctttgcaggcaaggccccatgtcacctcgataatggtccctgagttagtacaagcagcatccccatttttatcttatctttgagatggaatctcgctctgtcgcccaggcaggagtgcagtggcgcaatcttggctcactgcaacctccacctcccaggctcaagcgattctcctgcctcagcctcctgagtagctgggattgcaggtgtttaccaccacactcagctaatttttgtatttttagtagagacggagtttcaccacgttggccaggctgatcttgaactcctgatctcaagtgatctgcccacctccaactcccaaagtgctgggattacaggcatgagccactgcacccagccagcattcccattttaaagacgagcaaactaggagagagcttaagtaatttgccaaagttcacccaaacgttggaaccaaactcaaatgtaggccatacagcttcagagccatggtctcaactacaaggccacgtgagccttgatgcccagtgggtgctggtgctcagtgcatgtttgcagaaagaatctctctctgggtccttatggcctggcatgataagggtcaaatgatttagctcctaggcccctggactgacccagtccctgcaaaccatttcatctctcttggcctctactttctcatctgtaaaatggaaataaatacccattctctgtcaacttcacaggctttgtataatcaatatgtaatacgttactgagaaagggcttggaaaacagaagttctacaagggcccctgcagcccaggagcctttgctgcagtcttcttttttttggttttcttttctttttttttttggagacacagtctccccgttgcccaggctggagtgcagtggcatgatctcggctcactgtaaactccacctcctgggttcatccgtctcgctctgtcgcccaggccggactgcggactgcagtggcgcagtctcggctcactgcaagctccgcttcccgggttcacgccattctcctgcctcagcctcccgagtagctgggactacaggcgcccgccaccgcgcccggctaattttttgtatttttagtagagacggggtttcacctgggttcaagtaattcttgtctcagcgtcccaagtagctggaattacaggtgcccaccaccatgcctggctaatgtttgtatttttattagagacggggtttcaccatgttggccaggttggtctcaaactcctcaccttaggtgatccacccacctcggcctcccaaagtgctgggattacaggtgtgagccaccgcacatggcctttgccgcagtcttctaacagccctctcaccctccccaggtctctgctgggcaggcagcagccactcaccggaggaagatgtggttgcactgtttgcggatgtaggcccggagacccaggaacttgccatagacccggtgcaggatggtcttgaggtactcacgctcccggggatcctcactatcaaatagctccaggagctgtgggaaccagagtcagggtcagggtcagggtcaggggaaaggtccaccccaggttgcttccatcctatccctggcccctcagagagcctgcccctgccttgtggtaccacccagcctgggctccccacttcaccatcaggacaaacttttgatccacatatctcttggccacggagggctggaagtctgggctctccaagaaacgcaggaaaaactcatataccagctgggggagggggacagacaaaaaggtgagttcagtaacagcctcacccactcattccaccctatggccctcatccaactgtctaggggctaaggaggccctctccccatgccttggatctcttctgaaacttggatctctgtcttccccaacccttcagacctgcaggtgtggccacgaaggctcaagattgggctcatcctcttcagggtcaaattcagggttctcactgggcggcagagtccggaagatattcactgagatctgagtggcagagttggggttcattaaggaaaagcccttgaagacagaagccagggagtctctcattcaaagctttttttttttttttctttcccaagacagggtctcgctctgttgcccaagctggagcgcagtggtacaatctcgactcactgcaacctcaacctcccaggcaggctcaagcgatcctcccacctcagccttctgagtagctggactacagtagcacaccactatgcccggcaaatttttaaatttttgtagtgatgcggtctcactgtcaggctggtcttgaaccccttgcctcaagtgatcctctcgccttggcccaaagtgctgggattacagatgagagctgctgctcccggccctcattcaaagttctaatgggttgatttcagcatctgccccagcaagcagttcattccttgggcaatcatcacctgaacgcctagttcgtgcaagccctgggccaggggctgggaacccaggggtgaatgggacacatccctgccttctaggcaggtgcaatccagtggggagaacaaggctagaagctgtgaggtctacgggcaggaaaagggagatttccagcttggttattgacagcggcttcttggcagaggcggcacctgagccaggccatggatggtatggggtgtggggcagggcactccaggtctcaggcaagcataagcaaaggtgtggacgtggggcaggcccggaggcattcagtgggtgttgggcagcagcaggtcggggggaaggaagacgtggactgaggccaagccgatgagtacagggttattctccacgcaggggtcctgcggacaggaaacggggctcacacgccctctcggccggccctcggagcctgggtggcaggtgctcaccatgcggatgatgtctgggtagacgggctcgatgaggacaccccgggtgctccccacacactccaccagctcgttgagggctgcccgcttcacctccttccccttgaggtcggccacacagtccaagaagtcaaacatcaccccacactgggccagcttccggctcagcagctcgtgc

SEQ ID NO: 708 - DNA, 9134 bp, Homo sapiens
agccgctctgttcctgggcctcggaagtggtgagctcgctgaggcaggaggagctctggggagggtctgggaatgtgtgacgagggccctgcaggccaagatggggcagatggagggaggaatgatgtttgcgctccagatggcgaagaaaattccagggaagggagaatcactgcacagagtggctgacacacaggtcctttccagagacagctgctcacactcacacccatacacacacacacacacacacaaaggcagatacagggaaaaggcagcaccattcaggcacacctcacctgtcagaccagccagccctggctcactcacctggaatgcagtatttaaagaactcgccatcccacctgcacacccacgtagagacatctccccactgtgtttcagatgcctatggcgtcccctcaaaccctggtcctctatctgctggtcctggcagtcactgaagcctggggccaggaggcagtcatcccaggctgccacttgcaccgtgagtacctctgggaccggagggctaggagcagtggaggttctgggtgggagcaaagagctgacagagtggacggtggggcaggcagcaccctaaagggccccacactgaggcacaggcaacgggagctggggcgaggcaaaccttggcagaggcgccgtctactgcttgcctatctccttctagccttcaatgtgacagtgcgaagtgaccgccaaggcacctgccagggctcccacgtggcacaggcctgtgtgggccactgtgagtccagcgccttcccttctcggtactctgtgctggtggccagtggttaccgacacaacatcacctccgtctctcagtgctgcaccatcagtggcctgaagaaggtgaggagggcccgggcccggtggatggacgctggggtcgcgggaagaccagagagatggagatcctagacagccctgagaaaggggactgcagcacggactcccctctcccgcaggtcaaagtacagctgcagtgtgtggggagccggagggaggagctcgagatcttcacggccagggcctgccagtgtgacatgtgtcgcctctctcgctactagcccatcctctcccctccttcctcccctgggtcacagggcttgacattctggtgggggaaacctgtgttcaagattcaaaaactggaaggagctccagccctgatggttacttgctatggaatttttttaaataaggggagggttgttccagctttgatcctttgtaagattttgtgactgtcacctgagaagaggggagtttctgcttcttccctgcctctgcctggcccttctaaaccaatctttcatcattttacttccctctttgcccttacccctaaataaagcaagcagttcttgaatttctctctttattaagtctacccccagccacggaaagaggagtagaccatgattactgtgaacccccccttaccccaggacactgtgaatctcttcttgcctgtgccctccccctccccctgcccaataaataaaaaggggacaaggaagtacacagcgagggaagggaggagtgtgcacccaggacagtgtctgtgtagagggtgagctgggcgagaataaatagaccatggaccccatggtggggataaggaaggacctcgcattggccaaggcaggggcaggcgaggcgctgagtgcccttgcccaaggccaggagcagagggtgggagcccgcctgcagctggagcctagctttgcggggcaggggaagatccctgatggcagcttcctggtcaagcttgcccttgtcaagtcctgccacgaggggctgagcattctgttgccaagaccaccattgcctctcctcgtctccccccagtgaaagctgggctgggcagggagtcctcagaagccactctggcaaggccaggggtaggtgtgtttctctctgggcccctggacaggagaagggatagagggactgacagctctgggtttagcttttccccttctgaggtgctgtctagctctgacccccactggcggccacctggggtgtaagccgctggaggggggcctccttggccccctgggtcccctgtagccggcgtagccgcagctcctccagaccttgccataactcctgacgctcctgggccttctgctgctccctggggagagagggtgaggcagctccctttcctggggccccccacagtccagactccctcacagtccagactccctcactaccaccccaccggcaaagggaaggcatggaaccatttttgttctgtgactccataaaaaccctctactgagggaagagagcagaggacagacagatcccagcctgcagtcacagagaagatgacgggtggggcctgagtggttctggcttctgtaggaagctacagggagtcagaacaagtctgagctactcgaagaatgacgggaggatacaggggcagacagtcaggcataggatggcaggagcatggacagtcttgcagcatctgatcagacagagtttggggtagtcctcgggttccctccagccatgggggtctgattcctccctgctcttctcccttcccccacgcccagcccccaacactcactgctgcttttccagcttgtaggaggctgtgagctcatcaaacagcttcccattcatctccatgaaggtcttgagcacattgtagatcagtgatacgatggttcttggcagtgtcaaggagggatgaggagatgaaacagctttggtttgcccacctctccctttccctgcccttcacatacagcattccacctgaacacaagcactgcccactttcctgtccttttcaccaccccctgggccatcttttgatgctttctctgatattctccagctaggagtaaccctggggtcgggtctggactggctggccctggtcccagtttctgtgagttaggtcatggcctggcactcactggttccagtgctccttggagacttggtagagggtcccaaacacagcaggcagcacagtgtggcagttgtcctcaatgaggcttaggatatactcattgttccagaaatacagagcccgctctgcaacctggggcagacaagatggcagagtgattaactggcagtggcttctctctgtgtgcaaggtctggtgtccatcactacctcaacgcccaggccccctgaccttcacacaccccaccttcagggcttatctgagccctggaggaagcaacagtgttgaagggaaaagagttctagatacggaatccaatgctgcggggtgaatcctaaccactacagactctactatgccatgtgaccttgggagaggcatttaacctcccagcctcagttttctcatctgtaaaatgggctaataatacctatctcaacaggatgttataagaatcaaatgagatactagacttttaggtgtttaatgaaccgaagtgccagaatcactgtgaggaagacttgacttccactgggttatggcccataagaacgggaggaagtctgcacatgcttgcagcagaacatgagttagttagctgggttggtgcggggaagcctggctgcatcccaaagcgagtctaatgaaatctaaggccactagcaaaaggggaaaagtgataacagtcctccatcacattctggatcacacttcagtttaccaaacatgtttacactcacaatctcttccatccttatccccaccctgtgaagaggttgttggcccattttacagctgcggaagcttaatcagaatcagagtggtgcagtgatttgctcaaggcccctcagccagtggaaggcaggtccgaggcttcaccctaggtctcctgaccctaagtccagcatctccccattaccagacccgggattggaggagaaactgagggcaaagggagctttattaggtcagctacccaacctttccaggccagccctgctcccatccccgcctgtcctgcctcatacctggaaatgggggctggaaacacagcgagccacctgcttaaaaaggggctcctggatcttcacaaactgggagggctcgatgacatcaagaatctcttccatctcccccagaaacatcacctgggtgggttggggaggggagtagggacagaggggcagcagctcacatctccccctacacatacacacacctgactgccttctagaggccgagccctcccagcctccctctggcgggcatcaaagcccttcttcatacctccttctgggtgcaggtttttggccagtatttgagcagcccccggatcacctgtgggagatgagacaggagtcacgcctgcagaggtgagaggctgccttagcccccagaggtactcacgtgctctgtcagagtggcatccttctccaggaactgcaccacacagtatgccagctgcagggggtgacaggtggagggaaggaagacaggtcaggaaggcaccaggcgccaaggacttgctgtccaggacagaatgccaaatactgctcacccacggcctgttactttcttattcaccaagcatttatcacctgcctaggatgtaccaggcatcacattcagtgtgctgggaatacaactctgatctcgcggggagtggggacagtcaacaaactcatctttataaattttgcaaaaggttccataatatggctagtgtggtggctcacgcctgtaatccaagcactttgggaggccgaggcagcagaatcacttgagcctgggagtttgagaccagcctaggtaacatagcaagacactgtctctacaaaaaaaaaattttttttaattagccaggcatgtggcacatacatctgtggtcccagctactcgggaggctgagaagggaggactgcttgagcccagcaggtagaggcttcagtgagccatgttcataccactgctctccagctgaggcaacagagtacggttttgtctcaaaaaaaaaaattgtgtatcaaaatctcccataatagatttgtgtatccaaatatttgggaatatagatggagaagaatgtaattctgccaagggagggtagagaagaaaagcctggcttcacagagctgatatctgaggttagccttaaagcgccagtgggaattttctaaggtagatggaacagaattataaagacaaagaaggtgagataggatccctggaggatctgacctccaggacccactggctgccctgactgtctggagctcctgctgcagcagggacaggcctgggcctcacctgggcatggaagacagacagcgacttgacagagtgcagggggatcaggacgcgaaccaggaactgcttgtgctccgtcttcaggggcagcgcaaagccattgatgatgctgaggaggaggcagaagagaggaagagggctcaggtgacctggccccagtccctccttccagaatcctgagctccagctgaggcccagggagaatcaccttcctaggatctccagcagctcagccacaccattgaagtgctcgaattcatagatgaacctgcaagagaagaacgcaggtgggctcaaagcaagcagggtaggcccagtgcccccttaggcatcctgcctgcccaccctcacctgcacggcacgctcatccaactctcccccaacccagaggctgcgctcccttcccaacatcccaaaccaggccccattgagatccccgtccccccacactgaaatgcccttctcagcccagccacctctgccactgagtcccaagctcaaggctctcttgccagtcaaccaagagaatgacaaacacttagcacatctactccgtaccatgtaagtctcagaattatccagggagatggggcttaagaaatccatcacatggatgaagaaatcaagactcagcggttaaataaaacaaccccaatgttaataggcagggaatctcatgaactccaaggtgcaggaggacagggatcatggctcacccattttgtagctaataacaactaatgtttcagagtcccggcctcagtccaggagctatgctgagtgctttgcaggcaaggccccatgtcacctcgataatggtccctgagttagtacaagcagcatccccatttttatcttatctttgagatggaatctcgctctgtcgcccaggcaggagtgcagtggcgcaatcttggctcactgcaacctccacctcccaggctcaagcgattctcctgcctcagcctcctgagtagctgggattgcaggtgtttaccaccacactcagctaatttttgtatttttagtagagacggagtttcaccacgttggccaggctgatcttgaactcctgatctcaagtgatctgcccacctccaactcccaaagtgctgggattacaggcatgagccactgcacccagccagcattcccattttaaagacgagcaaactaggagagagcttaagtaatttgccaaagttcacccaaacgttggaaccaaactcaaatgtaggccatacagcttcagagccatggtctcaactacaaggccacgtgagccttgatgcccagtgggtgctggtgctcagtgcatgtttgcagaaagaatctctctctgggtccttatggcctggcatgataagggtcaaatgatttagctcctaggcccctggactgacccagtccctgcaaaccatttcatctctcttggcctctactttctcatctgtaaaatggaaataaatacccattctctgtcaacttcacaggctttgtataatcaatatgtaatacgttactgagaaagggcttggaaaacagaagttctacacagggcccctgcagcccaggagccttgctgcagtcttcttttttttgttttgttttctttttttttttgagacacagtctccccgttgcccaggctggagtgcagtggcatgatctcggctcactgtaaactccacctcctgggttcatccgtctcgctctgtcgcccaggccggactgcggactgcagtggcgcagtctcggctcactgcaagctccgcttcccgggttcacgccattctcctgcctcagcctcccgagtagctgggactacaggcgcccgccaccgcgcccggctaattttttgtatttttagtagagacggggtttcacctgggttcaagtaattcttgtctcagcgtcccaagtagctggaattacaggtgcccaccaccatgcctggctaatgtttgtatttttattagagacggggtttcaccatgttggccaggttggtctcaaactcctcaccttaggtgatccacccacctcggcctcccaaagtgctgggattacaggtgtgagccaccgcacatggcctttgccgcagtcttctaacagccctctcaccctccccaggtctctgctgggcaggcagcagccactcaccggaggaagatgtggttgcactgtttgcggatgtaggcccggagacccaggaacttgccatagacccggtgcaggatggtcttgaggtactcacgctcccggggatcctcactatcaaatagctccaggagctgtgggaaccagagtcagggtcagggtcagggtcaggggaaaggtccaccccaggttgcttccatcctatccctggcccctcagagagcctgcccctgccttgtggtaccacccagcctgggctccccacttcaccatcaggacaaacttttgatccacatatctcttggccacggagggctggaagtctgggctctccaagaaacgcaggaaaaactcatataccagctgggggagggggacagacaaaaaggtgagttcagtaacagcctcacccactcattccaccctatggccctcatccaactgtctaggggctaaggaggccctctccccatgccttggatctcttctgaaacttggatctctgtcttccccaacccttcagacctgcaggtgtggccacgaaggctcaagattgggctcatcctcttcagggtcaaattcagggttctcactgggcggcagagtccggaagatattcactgagatctgagtggcagagttggggttcattaaggaaaagcccttgaagacagaagcaggagtctcattcaaagcttttttttttttttctttccccaagacggggtctcgctctgttgcccaagctggagcgcagtgtacaatctcgactcactgcaacctcaacctcccaggcaggctcaagcgatcctcccacctcagccttctgagtagctggactacagtagcacaccactatgcccggcaaatttttaaatttttgtagtgatgcggtctcactgtcaggctggtcttgaaccccttgcctcaagtgatcctctcgccttggcccaaagtgctgggattacagatgagagctgctgctcccggccctcattcaaagttctaatgggttgatttcagcatctgccccagcaagcagttcattccttgggcaatcatcacctgaacgcctagttcgtgcaagccctgggccaggggctgggaacccagcagtgaatgggacacatccctgccttctaggcaggtgcaatccagtggggagaacaaggctagaagctgtgaggtctacgggcaggaaaagagagatttccagcttggttattgacagcggcttcttggcagaggcggcacctgagccaggccatggatggtatggggtgtggggcagggcactccaggtctcaggcaagcataagcaaaggtgtggacgtggggcaggcccggaggcattcagtgggtgttgggcagcagcaggtcggggggaaggaagtcgtggactgaggccaagccgatgagtacagggttattctccacgcaggggtcctgcggacaggaaacggggctcacacgccctctcggccggccctcggagcctgggtggcaggtgctcaccatgcggatgatgtctgggtagacgggctcgatgaggacaccccgggtgctccccacacactccaccagctcgttgagggctgcccgcttcacctccttccccttgaggtcggccacacagtccaagaagtcaaacatcaccccacactgggccagcttccggctcagcagctcgtgc

SEQ ID NO: 709 - DNA, 10929 bp, Homo sapiens
agccgctctgttcctgggcctcggaagtggtgagctcgctgaggcaggaggagctctggggagggtctgggaatgtggacgagggccctgcaggccaagatggggcagatggagggaggaagatgtttgcgctccagatggcgaagaaaattccagggaagggagaatcactgcacagagggctgacacacaggtcctttccagagacagctgctcacactcacacccatacacacacacacacacacacaaaggcagatacagggaaaaggcagcaccattcaggcacacctcacctgtcagaccagccagccctggctcactcacctggaatgcagtatttaaagaactcgccatcccacctgcacacccacgtagagacatctccccactgtgtttcagatgcctatggcgtcccctcaaaccctggtcctctatctgctggtcctggcagtcactgaagcctggggccaggaggcagtcatcccaggctgccacttgcaccgtgagtacctctgggaccggagggctaggagcagtggaggttctgggtgggagcaaagagctgacagagtggacggtggggcaggcagcaccctaaagggccccacactgaggcacaggcaacgggagctggggcgaggcaaaccttggcagaggcgccgtctactgcttgcctatctccttctagccttcaatgtgacagtgcgaagtgaccgccaaggcacctgccagggctcccacgtggcacaggcctgtgtgggccactgtgagtccagcgccttcccttctcggtactctgtgctggtggccagtggttaccgacacaacatcacctccgtctctcagtgctgcaccatcagtggcctgaagaaggtgaggagggcccgggcccggtggatggacgctggggtcgcgggaagaccagagagatggagatcctagacagccctgagaaaggggactgcagcacggactcccctctcccgcaggtcaaagtacagctgcagtgtgtggggagccggagggaggagctcgagatcttcacggccagggcctgccagtgtgacatgtgtcgcctctctcgctactagcccatcctctcccctccttcctcccctgggtcacagggcttgacattctggtgggggaaacctgtgttcaagattcaaaaactggaaggagctccagccctgatggttacttgctatggaatttttttaaataaggggagggttgttccagctttgatcctttgtaagattttgtgactgtcacctgagaagaggggagtttctgcttcttccctgcctctgcctggcccttctaaaccaatctttcatcattttacttccctctttgcccttacccctaaataaagcaagcagttcttgaatttctctctttattaagtctacccccagccacggaaagaggagtagaccatgattactgtgaacccccccttaccccaggacactgtgaatctcttcttgcctgtgccctccccctccccctgcccaataaataaaaaggggacaaggaagtacacagcgagggaagggaggagtgtgcacccaggacagtgtctgtgtagagggtgagctgggcgagaataaatagaccatggaccccatggtggggataaggaaggacctcgcattggccaaggcaggggcaggcgaggcgctgagtgcccttgcccaaggccaggagcagagggtgggagcccgcctgcagctggagcctagctttgcggggcaggggaagatccctgatggcagcttcctggtcaagcttgcccttgtcaagtcctgccacgaggggctgagcattctgttgccaagaccaccattgcctctcctcgtctccccccagtgaaagctgggctgggcagggagtcctcagaagccactctggcaaggccaggggtaggtgtgtttctctctgggcccctggacaggagaagggatagagggactgacagctctgggtttagcttttccccttctgaggtgctgtctagctctgacccccactggcggccacctggggtgtaagccgctggaggggggcctccttggccccctgggtcccctgtagccggcgtagccgcagctcctccagaccttgccataactcctgacgctcctgggccttctgctgctccctggggagagagggtgaggcagctccctttcctggggccccccacagtccagactccctcacagtccagactccctcactaccaccccaccggcaaagggaaggcatggaaccatttttgttctgtgactccataaaaaccctctactgagggaagagagcagaggacagacagatcccagcctgcagtcacagagaagatgacgggtggggcctgagtggttctggcttctgtaggaagctacagggagtcagaacaagtctgagctactcgaagaatgacgggaggatacaggggcagacagtcaggcataggatggcaggagcatggacagtcttgcagcatctgatcagacagagtttggggtagtcctcgggttccctccagccatgggggtctgattcctccctgctcttctcccttcccccacgcccagcccccaacactcactgctgcttttccagcttgtaggaggctgtgagctcatcaaacagcttcccattcatctccatgaaggtcttgagcacattgtagatcagtgatacgatggttcttggcagtgtcaaggagggatgaggagatgaaacagctttggtttgcccacctctccctttccctgcccttcacatacagcattccacctgaacacaagcactgcccactttcctgtccttttcaccacccctgggccatcttttgatgctttctctgatattctccagctaggagtaaccctggggtcgggtctggactggctggccctggtcccagtttctgtgagttaggtcatggcctggcactcactggttccagtgctccttggagacttggtagagggtcccaaacacagcaggcagcacagtgtggcagttgtcctcaatgaggcttaggatatactcattgttccagaaatacagagcccgctctgcaacctggggcagacaagatggcagagtgattaactggcagtggcttctctctgtgtgcaaggtctggtgtccatcactacctcaacgcccaggccccctgaccttcacacaccccaccttcagggcttatctgagccctggaggaagcaacagtgttgaagggaaaagagttctagatacggaatccaatgctgcggggtgaatcctaaccactacagactctactatgccatgtgaccttgggagaggcatttaacctcccagcctcagttttctcatctgtaaaatgggctaataatacctatctcaacaggatgttataagaatcaaatgagatactagacttttaggtgtttaatgaaccgaagtgccagaatcactgtgaggaagacttgacttccactgggttatggcccataagaacgggaggaagtctgcacatgcttgcagcagaacatgagttagttagctgggttggtgcggggaagcctggctgcatcccaaaacgagtctaatgaaatctaaggccactagcaaaaggggaaaagtgataacagtcctccatcacattctggatcacacttcagtttaccaaacatgtttacactcacaatctcttccatccttatccccaccctgtgaagaggttgttggcccattttacagctgcggaagcttaatcagaatcagagtggtgcagtgatttgctcaaggcccctcagccagtggaaggcaggtccgaggcttcaccctaggtctcctgaccctaagtccagcatctccccattaccagacccgggattggaggagaaactgagggcaaagggagctttattaggtcagctacccaacctttccaggccagccctgctcccatccccgcctgtcctgcctcatacctggaaatgggggctggaaacacagcgagccacctgcttaaaaaggggctcctggatcttcacaaactgggagggctcgatgacatcaagaatctcttccatctcccccagaaacatcacctgggtgggttggggaggggagtagggacagaggggcagcagctcacatctccccctacacatacacacacctgactgccttctagaggccgagccctcccagcctccctctggcgggcatcaaagcccttcttcatacctccttctgggtgcaggtttttggccagtatttgagcagcccccggatcacctgtgggagatgagacaggagtcacgcctgcagaggtgagaggctgccttagcccccagaggtactcacgtgctctgtcagagtggcatccttctccaggaactgcaccacacagtatgccagctgcagggggtgacaggtggagggaaggaagacaggtcaggaaggcaccaggcgccaaggacttgctgtccaggacagaatgccaaatactgctcacccacggcctgttactttcttattcaccaagcatttatcacctgcctaggatgtaccaggcatcacattcagtgtgctgggaatacaactctgatctcgcggggagtggggacagtcaacaaactcatctttataaattttgcaaaaggttccataatatggctagtgtggtggctcacgcctgtaatccaagcactttgggaggccgaggcagcagaatcacttgagcctgggagtttgagaccagcctaggtaacatagcaagacactgtctctacaaaaaaaaaattttttttaattagccaggcatgtggcacatacatctgtggtcccagctactcgggaggctgagaagggaggactgcttgagcccagcaggtagaggcttcagtgagccatgttcataccactgctctccagctgaggcaacagagtacggttttgtctcaaaaaaaaaaattgtgtatcaaaatctcccataatagatttgtgtatccaaatatttgggaatatagatggagaagaatgtaattctgccaagggagggtagagaagaaaagcctggcttcacagagctgatatctgaggttagccttaaagcgccagtgggaattttctaaggtagatggaacagaattataaagacaaagaaggtgagataggatccctggaggatctgacctccaggacccactggctgccctgactgtctggagctcctgctgcagcagggacaggcctgggcctcacctgggcatggaagacagacagcgacttgacagagtgcagggggatcaggacgcgaaccaggaactgcttgtgctccgtcttcaggggcagcgcaaagccattgatgatgctgaggaggaggcagaagagaggaagagggctcaggtgacctggccccagtccctccttccagaatcctgagctccagctgaggcccagggagaatcaccttcctaggatctccagcagctcagccacaccattgaagtgctcgaattcatagatgaacctgcaagagaagaacgcaggtgggctcaaagcaagcagggtaggcccagtgcccccttaggcatcctgcctgcccaccctcacctgcacggcacgctcatccaactctcccccaacccagaggctgcgctcccttcccaacatcccaaaccaggccccattgagatccccgcccccccacactgaaatgcccttctcagcccagccacctctgccactgagtcccaagctcaaggctctcttgccagtcaaccaagagaatgacaaacacttagcacatctactccgtaccatgtaagtctcagaattatccagggagatggggcttaagaaatccatcacatggatgaagaaatcaagactcagcggttaaataaaacaaccccaatgttaataggcagggaatctcatgaactccaaggtgcaggaggacagggatcatggctcacccattttgtagctaataacaactaatgtttcagagtcccggcctcagtccaggagctatgctgagtgctttgcaggcaaggccccatgtcacctcgataatggtccctgagttagtacaagcagcatccccatttttatcttatctttgagatggaatctcgctctgtcgcccaggcaggagtgcagtggcgcaatcttggctcactgcaacctccacctcccaggctcaagcgattctcctgcctcagcctcctgagtagctgggattgcaggtgtttaccaccacactcagctaatttttgtatttttagtagagacggagtttcaccacgttggccaggctgatcttgaactcctgatctcaagtgatctgcccacctccaactcccaaagtgctgggattacaggcatgagccactgcacccagccagcattcccattttaaagacgagcaaactaggagagagcttaagtaatttgccaaagttcacccaaacgttggaaccaaactcaaatgtaggccatacagcttcagagccatggtctcaactacaaggccacgtgagccttgatgcccagtgggtgctggtgctcagtgcatgtttgcagaaagaatctctctctgggtccttatggcctggcatgataagggtcaaatgatttagctcctaggcccctggactgacccagtccctgcaaaccatttcatctctcttggcctctactttctcatctgtaaaatggaaataaatacccattctctgtcaacttcacaggctttgtataatcaatatgtaatacgttactgagaaagggcttggaaaacagaagttctacaagggcccctgcagcccaggagcctttgctgcagtcttctttttttttgttttcttttctttttttttttgagacacagtctccccgttgcccaggctggagtgcagtggcatgatctcggctcactgtaaactccacctcctgggttcatccgtctcgctctgtcgcccaggccggactgcggactgcagtggcgcagtctcggctcactgcaagctccgcttcccgggttcacgccattctcctgcctcagcctcccgagtagctgggactacaggcgcccgccaccgcgcccggctaattttttgtatttttagtagagacggggtttcacctgggttcaagtaattcttgtctcagcgtcccaagtagctggaattacaggtgcccaccaccatgcctggctaatgtttgtatttttattagagacggggtttcaccatgttggccaggttggtctcaaactcctcaccttaggtgatccacccacctcggcctcccaaagtgctgggattacaggtgtgagccaccgcacatggcctttgccgcagtcttctaacagccctctcaccctccccaggtctctgctgggcaggcagcagccactcaccggaggaagatgtggttgcactgtttgcggatgtaggcccggagacccaggaacttgccatagacccggtgcaggatggtcttgaggtactcacgctcccggggatcctcactatcaaatagctccaggagctgtgggaaccagagtcagggtcagggtcagggtcaggggaaaggtccaccccaggttgcttccatcctatccctggcccctcagagagcctgcccctgccttgtggtaccacccagcctgggctccccacttcaccatcaggacaaacttttgatccacatatctcttggccacggagggctggaagtctgggctctccaagaaacgcaggaaaaactcatataccagctgggggagggggacagacaaaaaggtgagttcagtaacagcctcacccactcattccaccctatggccctcatccaactgtctaggggctaaggaggccctctccccatgccttggatctcttctgaaacttggatctctgtcttccccaacccttcagacctgcaggtgtggccacgaaggctcaagattgggctcatcctcttcagggtcaaattcagggttctcactgggcggcagagtccggaagatattcactgagatctgagtggcagagttggggttcattaaggaaaagcccttgaagacagaagccagggagtctctcattcaaagctttttttttttttttctttcccaagacagggtctcgctctgttgcccaagctggagcgcagtggtacaatctcgactcactgcaacctcaacctcccaggcaggctcaagcgatcctcccacctcagccttctgagtagctggactacagtagcacaccactatgcccggcaaatttttaaatttttgtagtgatgcggtctcactgtcaggctggtcttgaaccccttgcctcaagtgatcctctcgccttggcccaaagtgctgggattacagatgagagctgctgctcccggccctcattcaaagttctaatgggttgatttcagcatctgccccagcaagcagttcattccttgggcaatcatcacctgaacgcctagttcgtgcaagccctgggccaggggctgggaacccagcagtgaatgggacacatccctgccttctaggcaggtgcaatccagtggggagaacaaggctagaagctgtgaggtctacgggcaggaaaagagagatttccagcttggttattgacagcggcttcttggcagaggcggcacctgagccaggccatggatggtatggggtgtggggcagggcactccaggtctcaggcaagcataagcaaaggtgtggacgtggggcaggcccggaggcattcagtgggtgttgggcagcagcaggtcggggggaaggaagtcgtggactgaggccaagccgatgagtacagggttattctccacgcaggggtcctgcggacaggaaacggggctcacacgccctctcggccggccctcggagcctgggtggcaggtgctcaccatgcggatgatgtctgggtagacgggctcgatgaggacaccccgggtgctccccacacactccaccagctcgttgagggctgcccgcttcacctccttccccttgaggtcggccacacagtccaagaagtcaaacatcaccccacactgggccagcttccggctcagcagctcgtgcagctcggaagccggcacatctggggaggagagggcatcctgggcctgggccccagctcccccagctgccccagctgtgggtggggcagaccctcctaatctccacggctgcctctgctgcccccaggccccatgctcttgtgccatctcctgctccttgcagacagcaaacaactactgtcccttcctccattcctgggggttgagggttgcttttcttcctcctaatccaggctcagagagtatgatggcctgagttttaaagcaagatcacaaatcctggatgcagcagctttccacaggtgccccaaacagctgctgcctccctctcaggtggcaccctgttctaagggccagaaatggggaggggttcagggccaaggatctctacggtgtcctcaggcttggccagtctggccctatggcccaaggctggggaagggacctatgtggtgatcccagggaaccctgccaagcgcctgctccagggatctggcagctggctgggctgatagtggccccctggaacccaggctatgggccccacccttggccttggtctgcccctagggtggcaccaccttcggatgtcccacctccaaggatgacaggccagtcaggccatgtgtcagcagagagggctggagggctggggtcagttctgatggcggagaacctagcctggaggggtatccaaactctctctcttggcagctgcccgctgcctcccacccctccccatggccctgctggtcccctcgggggttcggttcccccagtggccagcagccagctcacctttgagcaggggcagcggtgtgagctcttgctggttgctctgatagcggaactgagaggagctgtgggagcggcggggccgggctctgcggagggaacggcgggagaagccgtccaccttgtcgggtgggggcacaggcgacagcccgggggaggaggggctagtgggggtgcttgcagggggcagcttcgtctccatggcggtcaggcggcagggcaagctttcagagccccgggggttctctctgggcctgggaggtgctgggtgagactggacagactaacttggtcccatcctgtccggcctttggggggggggcacaaccacagtcctgggcccccccccagggcctcctgcaactgcccagtcctggggggcagacagggtagaaaggaggatggctcaggcctcagatccttcctgggggtcccgaagagtccagttagggttcccaccctggctcttttgaaaacgaagtcaggcagaaagatcagcaagaaagagacagagaaagcccatcagttcctcaggagagccgggaggctgcgtggagtgcccaggtcttttccctcctatccttgcccagaccctaaaataggggtgcagccccctcccatcctggacatgtccctcccttctctcagacagaaagcctccaaaacaacccctcccagaatagggcctatcccccaagccagccccgactcagaatggagccccgatcgtcatccctgcccctttcagaatggaacgcatcgctgctccactaatcccggccacttgggacaaccccaagactggaggtgctgtcccgatgccaccccgctcctagaacctggcaccctcccccacctcagctcctccttcctggccccccaaacctcatggggtgggggacactcacttctcgaaaacctagacttcggtcgccaacccccgggggctgcccgtagggagggcgacggccgttcagggccccttcgcagcggttccgc

SEQ ID NO: 710 - DNA, 576 bp, Homo sapiens
aaggaggcactacattcagcagcatcctaccagccggggccagagcaggcaagatggacaatgctccatcacctgaatgcgccaggctgtgtcctagagagaagcttccagaagcctcccaacttcattagcccctgcagagggatgatgactccagcctctgtaggttcctgcttgagaaaactcaatgctgccaggcgaacttactgtttgttccagccaaaacctggtgacagggagataggccctggaacccctctttgagcagcagttcctttagaaagcttgcaattgtgggccaggcatggtggctcacacctgtaatcccagcactttgagaggctgagttgggtggatcacttgtcataggagttcaagaccagcctggtcaacatggcaaaaccctgtctctactaaaatacaaaaattagccaagcgtggtggtgcacgcctgtaatcccagctactcaggaggctgaggcaggagaatgacttgaacccaggaggcagaggttgtagtgagccaggatcgtgccattgcactgcagcctaggtgacagaacaagactccatctc

SEQ ID NO: 711 - DNA, 630 bp, Homo sapiens
ccccaccatgcacagccagtccacactgtccaaaggcagaggaggtggggtcggtcagggttgtccaggccggtctctcaggcacagctgggccaggaggcagggtgatggggggctctctagatttggggctcatcatcctggtcaaagtcctgcctgtaaccgctcccaggccccagaccctcagctctctcatctagaaagggctctcggcatttctccccagatcattgtaggatgccaagcatatatcacaggaactgagcagctatagtgtctgatcctacaggcgctttgtgatgggtcaaatgctcagtgtggctgagcacagatgactcgtaaaaaactccgtaacagcatctcaaaacactggtgaatgctaaggaaagtgatgcctcgaaagaaccataaaacccctcaggccttcatctaagtcatcgaacaccgtcttttcaaatgggactacctccagcgccctcctttcttcttggagcactaacagtcgaaggggggagctgattttggtgtgaattctgaagcagctcggttaagatatcgtaaagacaaatcttgaatcttaaaatcaatgtttctaccccactgtgtattcaagaatcacatttgcccaaa

SEQ ID NO: 712 - DNA, 172 bp, Homo sapiens
catttgtccacttccggataggcaccaattaacaaacctggagagcgtagtcatattaagcaaccctctgttgggaaggaaaaaatcctttcctgctacccgtcttaggttcattggtgggaaccctgtaacttgttattctgacaaaagacagattcacacgagaaaagca

SEQ ID NO: 713 - DNA, 869 bp, Homo sapiens
gccacctgagtagctgggattacaggcacatgtcaccatgcctggctaatttttgtatttttagtagagatgaggtttcatcatgttggccaggtcttgaacccctgacctcaagtgatctgcccagctcggcctcccaaagtgctgggattacaggcgtgagccaccatgcctagcctctggcactcatgtttacttggtggtcttgtaatttcagacacaccagctgccctcccaaggctggctcctcttaaggcttacccgtgttggctgccctcacatgatcctggcatgtagtcagtgctcaggacagttgtgtgtgggcagaagctgcgcagcccaaaggaggaccctcaggcccagggggttgagggatttgcctaagatcacgcagagatggcagctggcctgaactgcaacctggtgggggtgagcagcccacatgttacccgccccccgggctctttccaccatttcctgttctgttctgcagaactggccacagtgtcaaaaggctttggagaaattacagaagttcttggggtagacggaacctacatcaaagggaggcagatggggatgagaaaagcattcctgagtcaaggaatggaaagaaagattgctgctgtcctctcaccaaggacactctaaggccaggggccagatcttctgccttggctggcctctgttgagggtgggtaagggaaggaaggaatgctcagcttggtgttctcagcccccttgctgagtctgcggagccagagctacagctgtcttgatgctccctgagcaagtcccgagttgcctggtaccttgcagttcttggtgggagtttaactgcccagcattcccgttctcaaaaaaaaaaa

SEQ ID NO: 714 - DNA, 869 bp, Homo sapiens; identical to SEQ ID NO: 713

SEQ ID NO: 715 - DNA, 310 bp, Homo sapiens
cattttttttttttttttttttttttttgagacggagtctcgctctttcgcccaggctggactgcagtggcactatcttggctcactgcaagctccgcttcctgggttcacgccgttctcctgcctcagcctcctgagtagctgggactacaggcgcccgccactgcgcccggctaatttttttttgtgttttttgtagagatggggtttcaccgtgttagccatgatggtcttgatctcctgacctcatgatccacccgcctcggcctcccaaagtgctggaattacaggcgtgagccatcgcgcccgg

SEQ ID NO: 716 - DNA, 376 bp, Homo sapiens
tctgcctcccgggttcacgccattctcctgcctcagcctcccaagtagctgggactacaggcgcccgccaccacgcccggctaattttttgtatttttagtagagacgaggtttcatcatgttagccaggatggtcttgatctcctgaccccgtgatccgcccaccttggcctcccaaagtgctgggattacaggtgtgagccaccgcacctggccgattctgggtatgttttaaagatgacctgacagaccttgctagaggactgggcagagtgagaggggagctgaggatgactctgagggctgggagcagagcagctggaggcagagctgccatcatctgagatgagggcggctgtgggtgcagtaggttagt

SEQ ID NO: 717 - DNA, 311 bp, Homo sapiens
tcattttttttttttttttttttttttttgagacggagtctcgctctttcgcccaggctggactgcagtggcactatcttggctcactgcaagctccgcttcctgggttcacgccgttctcctgcctcagcctcctgagtagctgggactacaggcgcccgccactgcgcccggctaatttttttttgtgttttttgtagagatggggtttcaccgtgttagccatgatggtcttgatctcctgacctcatgatccacccgcctcggcctcccaaagtgctggaattacaggcgtgagccatcgcgcccgg

SEQ ID NO: 718 - DNA, 476 bp, Homo sapiens
gggtatgttttttttttttttttttttttttttttgagacagaatcttgtgctgtcgcccaggctggagtgcagtggcacgatctccgcttactgcaagctctgcctcccgggttcacgccattctcctgcctcagcctcccaagtagctgggactacaggcgcccgccaccacgcccggctaattttttgtatttttagtagagacgaggtttcatcatgttagccaggatggtcttgatctcctgaccccgtgatccgcccaccttggcctcccaaagtgctgggattacaggtgtgagccaccgcacctggccgattctgggtatgttttaaagatgacctgacagaccttgctagaggactgggcagagtgagaggggagctgaggatgactctgagggctgggagcagagcagctggaggcagagctgccatcatctgagatgagggcggctgtgggtgcagtaggttagt

SEQ ID NO: 719 - DNA, 3154 bp, Homo sapiens
tcaagaaccctattgaggcaagtgtcttgctggctgaagcctcgctggcacggaagcagcggaaaacacatactacctttattccactgatgctgaatgagatgccacagattggggacctggtgggtctggatgctgagtttgtcacccttaatgaggtaaccaagaccaaagggatggggcattggaagagaacgctgaggatattaggagttgtaagcatttctctgatttccttattaactcttctcatgtaggaggaagcagagttacgcagtgatggtaccaagtctaccattaaaccaagccagatgtcagtagccaggattacctgtgttcggggccagggacccaatgagggtatccccttcattgatgactacatctctacccaggagcaggtattaggatatggagatgcaagtgaggcacaccctggtgcttacttacagtgctcaagaacccagggaagagtgataggggaagactccatctcacttcctgaaaaaggcttgtccttttctctattcctaggtggtggattacttgactcaatactcgggtataaagcctggtgacctcgatgccaaaatttcctccaagcacctaacaactctcaagtctacctacttaaagcttcgttttctcattgacattggagtcaagtttgtgggtcatggcctgcagaaggacttccgggtcatcaacctgatggtttggcagggctcttttaagagtcttcttgtgagagtgggcccctcagggtatacattgtgcctttagagaatggggaattataggtcccctaccttaagtctccccctcttttatccttgccaggtgcccaaggaccaagtccttgacactgtctacctgttccatatgcaaaagaaaacgaatgatttccctgcgattccttgcttggtactttctgggtgagttgctctgccttgtaggcccctgctacattaatagcagaagcagccatttaaaaaaaaagaaatcatgttctttgcggcaacatggatggagctgtgggccatcatactaagtgaactaactcagaaacagaaaatcaaataccacatattctcacttataagttggaactaaacaatgagtacatatggacataagaatgacattagggactctaaaagttggggtggtgggtgaggggtgagggttgaaaattacgtattgggtgcatagttcactatttgcatattagggataccagaagcccagtccccaccagtacacgatacacccatgtaacaaacatgcacatgtaccccaaatctaaaataaaatttaaatataaaaaataaaagcatggggggaaaagaaaaagtaggaaaagtgttagaggacaaaatgggagtaggggagaccctcagttagtggtgacagttactaatggatttaattaacttcaatatcccttctgtgcactgaggaagatgtctgacaattttccttaagggcagtcaggctttttagttttctggagtcaggtaggagtggggagacatgttcctacctccctttgctgggtcccaaactattccacctttacttaccccagacctgaagattcaaggggaaacccatgacagtattgaggatgcccgcacagcccttcagctgtaccgaaagtatctggagctaagcaaaaatggcactgagcctgagtctttccacaaggtgctcaagggtctttatgagaagggcagaaagatggactggaaggtgcctgagcctgagggccaaacaagtcccaagagtaagacctgggatgggacaagggaaactggactgggtggattttgtattttgtttgtttgtgacagggtctcactctgtcacccaggctgaagtgcagtagcgtgattacagctcactgcagcctcgacttcctgggctcaagtgattctcccacctcagcctcccaagtacctgggacaacaggcacacaccaccacacccagctaatttttgtactttttgtagaaacaggattttgccatgttgcccaggctggtcttaaactcctgggctcaagcgatccacccaccttgggctcacaaagtgctgggattacaggcatgagcctgagcgcccccaattgggtggattttgattgcacatatggagaatagcacttaacagtttacaaagcacttcatcctcctaacattcagtaaaatacattttatcgaaactctccattaactataacttcctcttgcccaagtctaaaatgttcagggaaggtccatgcccttttttctcttgcatttttccttcataggaagtatgagaagatgctttttctccactcagcttgaatcatgcttttggttttgtctctgacagatgcagctgtcttctcctcagtgctggcgctctgactacccttcccaaagaaccacggccctctccctttactgttctatagccccagaactgggagatggcttcctaagttggctataccttgtccacttccagtactggacgtgctcagggtctagggtcacagatggtgctattaattgaactggaacacagcagaattgttgcaaaggttctaggagccagattcattccttcttcattctttgcaaaacagtggtacagacatggagtctagaattgacccagatggaaagtaattggtattcttaatatcctgggtgactaatatccaggcagagaagctcctggaaccataactgtaagttcctagctggctagggattgaagtcctggacagtgacagaggataccacagtagttcaagacttagcacaagtcaccaactgcttcagggatacctggaggggccagcaagtagagtgttggtggcccaagcaaaccagtgttgccaataccattgccaaaagggcctttggatcctggacaaagcttggctgccggcttcatttattcctgctgatggctgagaagcatctgtcttccatcccacttgcctgtcccaagttttgttccattttttaaaaatttgttgtaaactgcatgttttataaaataaaaataaaatatcgtttgttatttatctcattagagaactgctagtgtgggttctctggcttcagtcttcctctccttcctttgaaggtaaaggtcc

SEQ ID NO: 720 - DNA, 7445 bp, Homo sapiens
ggaggactttgacttcaaacactacaataagaccttgtttgctggattagagccccacattcccaacgcctactgtaactgcatgatccaggtaagggttgggtattcctgtaacttgaacgtgcctgctgcttttcttcttccctatggctctcgaccctgctctttccaggtctcctcagccgtgttctctttaccatggtctcctctacaattctttcttgcctctacaactttcaagtctcctctgagctccaccggtttggtggactcactgcttcggtggactcctgcttctgggacattttctccaccagctcacttaacctccatatttctcctcacccccaggccagtttcctacatcagttcttctgcttttccctccaggtgctctatttcctggagcctgtacgctgtctaattcaaaaccacctttgccagaaggagttctgtctggcatgtgagctgggcttcctgtttcacatgttggacctctctcgtggtgacccttgccaggtcagtacttggagacacttaaaatggaaggggaaggaaggtggacacaaaagacaaaataacccctttccaccaacacatttccagggcaataattttcttcgggcattccgtactattcctgaggcctcagccctcggtctaatcctggctgactcagatgaggcctcaggcaagggcaatctggccaggctcattcagaggtggaatcgcttcattctcactcaactgcatcaagatatgcaggagctggaaataccacaggcttatcgaggtgctggaggcaggtatgaaatcaggatagaaatagttaaagccatcatgacaggcccctctgtgatttaaaaggtctcctaacttcctcaatgtgcatatatcatcctctccactcttagcagcttttgctcatcgggggactctgttattgggcagctcttcagctgtgagatggagaactgcagcctctgccgctgtggcagtgagaccgtgcgagcctcatccactctgcttttcacactctcctaccctgatggtagcaaaagtggtatacccttcagctcagttgggaaggctccccaaaatgtcctgtaatatcagggagagggtgttggggactaactgtgggtagaggggagaaccaggagtatagcatctaattttccctcagataaaactgggaagaactatgactttgctcaggtgctgaagcgaagcatctgcctggaccagaatacacaggcctggtgtgacacctgtgaaaagtaccagcccacggtgagtggactgttggactggactagagtcctggtcctgccatggagattcagccactatcccatgtggggctggctctgtcagcactgccatccagggatctctggtggagtgaggaatcccaatttgaagacgcagacccaggtccctgtccagactccttttcctgtacattccctgccattccttgtttgtttcttcctctcagattcagacccgcaacatccgccatctgccagatattcttgtcatcaattgtgaggtgaacagctcaaaagaggctgatttctggagaatgcaggctgaggtaaggactcagactagaaacaaggcttccggaataatttttcattttatcccccttctgacctccatatatgattacattcctgaagaactggatgtttttcttctgtgttcaggttgccttcaagatggcagtaaagaaacacggtggggaaatctccaagaacaaggaatttgctttggctgattggtaggtgctgtcttgggagttgtcaaaggattgaattgcccagtggttcctcttatcaagacctctttcggaacaaatttccaattcttctgacctgataggaaggaactagggagtccagagggtgtgctggtgtgtccctccattgaggagttgaagaacgtctggcttcctttctccattcgcatgaagatgaccaaaaacaaagggctggatgtttgcaattggactgatggggatgagatgcaggttgttgaaaaaccgggaagaggaaagggaataagggagagaaggtggggcagaaggtaaaggagggcaggggaaggtgaaacttagcagagggaaaaggaagagaataaggcctagtatttacctgttaggggattttccatagtcactcagttcagtgttggggtcctagatgggctaggatggagataacccaccctggtcccccatcccccatacccccaactccctgtcctctgtccccattcccctcccttccccatccttaaacttagcttagcagcctgggtacccccctcacagtggggcccagccagggcagaggaggagcatggtgtctatgtgtatgacctgatggctactgtggtacacatcctggactcacgcacagggggcagcctggtggctcacatcaaagttggagagacctaccaccagcgcaaggaggtgagtgaggttgtagagggcaggaacactcctgggatggccacagtgagtcccagatctgtccttgagtctgagacagagtggtccagccatcaatttgtatcgccacaggctttctttgtatttccatagggcgttactcaccagcagtggtatctgttcaatgactttcttattgaacctattgataaggttagttgcaacatgttctgtttcttctttcatttccccttttcctagcatccttatctttagggctctatagaatgccaggcagattcaacagggagggaggaaggaatcctcaggaataaaaaccattagcacttaaaaatagcacctgaaaaaaaacaaaaactagcacctgagtcctggcctccgtctgaagtgggggaaaaggaaaagggtgatatacattagccataagtgctttttctcttctatagcatgaagctgtgcagtttgacatgaattggaaagtacctgcaatcctttattatgtcaaacggaatctcaattccagatacaacctgaacagtaagtgctacatagtagacccaagtgtgtggacagtttagattgggcttcagggtgagatctgggacattgcttgcaagtacttaggattggtaaccagtgttaatatttctggagatactaaagagattcctgctcatcagaccttaaatttagaagtgcgaaatccagcctgagcaacatagcaagatcccatctctttgaaaaaaaattttttttttttttttgagatgcagtcttgctctgtcacccaggctggagtgcaattgcgcaatctcggctcactgcaacctctgcctcctgggttcaagcgattctcctgcctcagcctcctgagtagctgggactacaggcacctgccaccacgccgggctaattttttgtatttttagtaagagacagggtttcaccatgttggccagggtggtcttgaactcctgacctcgagatccaccctccttggccttccaaagtgctgggtttacaggcgtgagccacagtgcccagcctgagaccctgtcttaaaaaaaaaaaaaaaaaaaaaaagcagctgtaagtcttgagagtggagtggaaatgagatgagggggggatgtttgatcagaatggcttaggttatgatgttacatctaattattcttttttttgagacagagtttcgctcttgttgcccaggctggagtgcaatggcatgatctcagctcactgcgacctctgcctcccgggttcaagcgattcccctgcctcagcctcccaagtagctgggattacaggcatgtgccaccacgcccggctaatttttttttgtgtctaattagtagagacggggtttcaccatgttgggcaggctggtctcaaactcctgacctcaggtgatccgcccgcctcggcctcccaaagtgctgggattacaggcattagccaccgcgcctggctatgagctccttattaagtacctatttggtacctttaaaccatagtttctctgtaacctttttctggattctgtaaactaaggtccaagtgaaaatcttattctttcttctctgtggtcttttctggttttttctcagcatgtttgttgataattttgtgatgtgacctgctctgtctacctgtcccatttatcagacatgatcttttttctcacgtgctttgattattgagggatcacagtgaagacccagagtcgatgatcagccacactgggcttctctcccctagtcacttccctatccaagccctgtgtcctctgcattctcccttctagtcaagaaccctattgaggcaagtgtcttgctggctgaagcctcgctggcacggaagcagcggaaaacacatactacctttattccactgatgctgaatgagatgccacagattggggacctggtgggtctggatgctgagtttgtcacccttaatgaggtaaccaagaccaaagggatggggcattggaagagaacgctgaggatattaggagttgtaagcatttctctgatttccttattaactcttctcatgtaggaggaagcagagttacgcagtgatggtaccaagtctaccattaaaccaagccagatgtcagtagccaggattacctgtgttcggggccagggacccaatgagggtatccccttcattgatgactacatctctacccaggagcaggtattaggatatggagatgcaagtgaggcacaccctggtgcttacttacagtgctcaagaacccagggaagagtgataggggaagactccatctcacttcctgaaaaaggcttgtccttttctctattcctaggtggtggattacttgactcaatactcgggtataaagcctggtgacctcgatgccaaaatttcctccaagcacctaacaactctcaagtctacctacttaaagcttcgttttctcattgacattggagtcaagtttgtgggtcatggcctgcagaaggacttccgggtcatcaacctgatggtttggcagggctcttttaagagtcttcttgtgagagtgggcccctcagggtatacattgtgcctttagagaatggggaattataggtcccctaccttaagtctccccctcttttatccttgccaggtgcccaaggaccaagtccttgacactgtctacctgttccatatgccccgaaaacgaatgatttccctgcgattccttgcttggtactttctgggtgagttgctctgccttgtaggcccctgctacattaatagcagaagcagccatttaaaaaaaaagaaatcatgttctttgcggcaacatggatggagctgtgggccatcatactaagtgaactaactcagaaacagaaaatcaaataccacatattctcacttataagttggaactaaacaatgagtacatatggacataagaatgacattagggactctaaaagttggggtggtgggtgaggggtgagggttgaaaattacgtattgggtgcatagttcactatttgcatattagggataccagaagcccagtccccaccagtacacgatacacccatgtaacaaacatgcacatgtaccccaaatctaaaataaaatttaaatataaaaaataaaagcatggggggaaaagaaaaagtaggaaaagtgttagaggacaaaatgggagtaggggagaccctcagttagtggtgacagttactaatggatttaattaacttcaatatcccttctgtgcactgaggaagatgtctgacaattttccttaagggcagtcaggctttttagttttctggagtcaggtaggagtggggagacatgttcctacctccctttgctgggtcccaaactattccacctttacttaccccagacctgaagattcaaggggaaacccatgacagtattgaggatgcccgcacagcccttcagctgtaccgaaagtatctggagctaagcaaaaatggcactgagcctgagtctttccacaaggtgctcaagggtctttatgagaagggcagaaagatggactggaaggtgcctgagcctgagggccaaacaagtcccaagagtaagacctgggatgggacaagggaaactggactgggtggattttgtattttgtttgtttgtgacagggtctcactctgtcacccaggctgaagtgcagtagcgtgattacagctcactgcagcctcgacttcctgggctcaagtgattctcccacctcagcctcccaagtacctgggacaacaggcacacaccaccacacccagctaatttttgtactttttgtagaaacaggattttgccatgttgcccaggctggtcttaaactcctgggctcaagcgatccacccaccttgggctcacaaagtgctgggattacaggcatgagcctgagcgcccccaattgggtggattttgattgcacatatggagaatagcacttaacagtttacaaagcacttcatcctcctaacattcagtaaaatacattttatcgaaactctccattaactataacttcctcttgcccaagtctaaaatgttcagggaaggtccatgcccttttttctcttgcatttttccttcataggaagtatgagaagatgctttttctccactcagcttgaatcatgcttttggttttgtctctgacagatgcagctgtcttctcctcagtgctggcgctctgactacccttcccaaagaaccacggccctctccctttactgttctatagccccagaactgggagatggcttcctaagttggctataccttgtccacttccagtactggacgtgctcagggtctagggtcacagatggtgctattaattgaactggaacacagcagaattgttgcaaaggttctaggagccagattcattccttcttcattctttgcaaaacagtggtacagacatggagtctagaattgacccagatggaaagtaattggtattcttaatatcctgggtgactaatatccaggcagagaagctcctggaaccataactgtaagttcctagctggctagggattgaagtcctggacagtgacagaggataccacagtagttcaagacttagcacaagtcaccaactgcttcagggatacctggaggggccagcaagtagagtgttggtggcccaagcaaaccagtgttgccaataccattgccaaaagggcctttggatcctggacaaagcttggctgccggcttcatttattcctgctgatggctgagaagcatctgtcttccatcccacttgcctgtcccaagttttgttccattttttaaaaatttgttgtaaactgcatgttttataaaataaaaataaaatatcgtttgttatttatctcattagagaactgctagtgtgggttctctggcttcagtcttcctctcgtttttttgaggtaacaggtcc

SEQ ID NO: 721 - DNA, 2724 bp, Homo sapiens
tggactgctcgctggccggcagcgcaccgttttgaaggtcctagcccacctgggctggctcacgcgcacgactagccgctcccatacagcacgcccggactctgtcgtcgcttaaggccactcctattctacggctgacccctggtggtcacgtggatctgttcgccacgcaagtctgggtccttcggcgattgaccggggtccttgctgttcgggagcctctcctaagctgcctgttcgcgcgagagtttggaggggcgggtttggggtcggtgtctgattggggctcgcaccgcagcacgctggagtcccgcttaggtaccagttagcgtcaggggagctgggtcaggcggtcgccgggacaccccgtgtgtggcaggcggcgaagcgctctggagaatcccggacagccctgctccctgcagccaggtgtagtttcgggagccactggggccaaagtgagagtccagcggtcttccagcgcttgggccacggcggcggccctgggagcagaggtgggacggatgcgggcggcgaggcgctgggcgctgagggttggggatggactgaagcgaaagcaatggcggagtccttagaaagggggctggtgtccgtacgggtaatcacttacgggctggaggtggggacgcaggaatcttcggtgcaggatccaaatgggccctagttattgctctcctcgctggcctcctggcctgactgagggctccctgccggcagttccctagtgcctgtagtcctcacgtaatcgccaacttacctcctgtagctgccacaaagccccgtgaaccctaggcatgcagtgctaaagtaccaacacttagggcctcacctatccacgtagagtctggggctgagccgcaagtcctgagctcgcgctcccacccaccaccctgggggaatcagagccctcaagcgctggaacagagaagcccctttgtgtcccggccatttcctggaaagtagagccagagtcacaatgaggcctttgaaagccttggggtgaggattgggggggtcagggaaaaatggagtcggctcctcacacttatgttttattcccactcaaacccaggtggagcgaccccattacgctaaagatgaaaggctggggttggctggccctgcttctgggggccctgctgggaaccgcctgggctcggaggagccaggatctccactgtggaggtaaaggcacaacgggaaaaagaagtggaggaagcagagccttgggagggcatgagatccaaggcctgggagaaggatgaatggaaatcctgggttgatcccattctcctcacaccctaccccctaccctgtcccctgctctcattctctcctcttccaccagcatgcagggctctggtggatgaactagaatgggaaattgcccaggtggaccccaagaagaccattcagatgggatctttccggatcaatccagatggcagccagtcagtggtggaggtaactgttactgttcccccaaacaaagtagctcactctggctttggatgaaattcgactgcttaaaaaggaccttggtttaatagaaatgaagaaaacagactcagaaaaaagatttggctctgtctcatttggaagaagctgcaggcttattccccatgcacttgcttcctggctgcaaaccttaatactttgtttctgctgtagaatttgttagcaaacagggagtcctgatcagcacccttctccacatccacatgactggtttttaatgtagcactgtggtatacatgcaaacatccgttcaaaatctgagtcggagctaaaaataaaaaatgaaaaaacagaaataagaataaaaggtcttatcctcataattaggaaattttaatcgaaaacaacacacatgtacacaaaggtgtatctaataagcaatatataaggcagtgttaagattacagtgctagcctgggcatcatggcaaaacaccaactctacaaaaaaatgcaaaagttagcagtgcatggtggcatgtgcctgtagtgacagctgcttggaaggctgaggtgggaggatcacttgagcccaggaggtcgaggctgcagtaagccgtgattgtgccactgcactccagcctgggaaacacagcaagaccctgtctcaaaaaaaaaccaaaacccagcactttgggaggccaaggcaggcggatcacctgaggtagaaagttcgagaccagcctggccaacatggtgaaactccgtctctactaaaaatacaaaaaagtagccaggcgtggtggctcatgcctatagtcccagctactcaggaggctgaggcaggagaatcacttgaacccaggaggcagaggttgcagtgagccaagatcgcaccactgcactccagtctggttgacaagaacaaaactctgtcttgaaaaaaaaaaaaggccgggcgcggtggctcacgcccgtaatgccagcactttgggaggctgaggtgggcagatcacaaggtcaggagatcgaaaccatcctggctaacatggtgaaaccccgtctctactaaaaatacaaaaaattagccgggcgtggtggtgggtgcctgtagtcccagctactcaggaggctgagacgaaaagaatggcgtgaactcgggaggcagagcttgcagtgagctgagatggtgccactgcactctagcctgggcgacacagcgagactcctctcaaaaaaaaaaaaa

SEQ ID NO: 722 - DNA, 2532 bp, Homo sapiens
tggactgctcgctggccggcagcgcaccgttttgaaggtcctagcccacctgggctggctcacgcgcacgactagccgctcccatacagcacgcccggactctgtcgtcgcttaaggccactcctattctacggctgacccctggtggtcacgtggatctgttcgccacgcaagtctgggtccttcggcgattgaccggggtccttgctgttcgggagcctctcctaagctgcctgttcgcgcgagagtttggaggggcgggtttggggtcggtgtctgattggggctcgcaccgcagcacgctggagtcccgcttaggtaccagttagcgtcaggggagctgggtcaggcggtcgccgggacaccccgtgtgtggcaggcggcgaagcgctctggagaatcccggacagccctgctccctgcagccaggtgtagtttcgggagccactggggccaaagtgagagtccagcggtcttccagcgcttgggccacggcggcggccctgggagcagaggtgggacggatgcgggcggcgaggcgctgggcgctgagggttggggatggactgaagcgaaagcaatggcggagtccttagaaagggggctggtgtccgtacgggtaatcacttacgggctggaggtggggacgcaggaatcttcggtgcaggatccaaatgggccctagttattgctctcctcgctggcctcctggcctgactgagggctccctgccggcagttccctagtgcctgtagtcctcacgtaatcgccaacttacctcctgtagctgccacaaagccccgtgaaccctaggcatgcagtgctaaagtaccaacacttagggcctcacctatccacgtagagtctggggctgagccgcaagtcctgagctcgcgctcccacccaccaccctgggggaatcagagccctcaagcgctggaacagagaagcccctttgtgtcccggccatttcctggaaagtagagccagagtcacaatgaggcctttgaaagccttggggtgaggattgggggggtcagggaaaaatggagtcggctcctcacacttatgttttattcccactcaaacccaggtggagcgaccccattacgctaaagatgaaaggctggggttggctggccctgcttctgggggccctgctgggaaccgcctgggctcggaggagccaggatctccactgtggaggtaaaggcacaacgggaaaaagaagtggaggaagcagagccttgggagggcatgagatccaaggcctgggagaaggatgaatggaaatcctgggttgatcccattctcctcacaccctaccccctaccctgtcccctgctctcattctctcctcttccaccagcatgcagggctctggtggatgaactagaatgggaaattgcccaggtggaccccaagaagaccattcagatgggatctttccggatcaatccagatggcagccagtcagtggtggaggtaactgttactgttcccccaaacaaagtagctcactctggctttggatgaaattcgactgcttaaaaaggaccttggtttaatagaaatgaagaaaacagactcagaaaaaagatttggctctgtctcatttggaagaagctgcaggcttattccccatgcacttgcttcctggctgcaaaccttaatactttgtttctgctgtagaatttgttagcaaacagggagtcctgatcagcacccttctccacatccacatgactggtttttaatgtagcactgtggtatacatgcaaacatccgttcaaaatctgagtcggagctaaaaataaaaaatgaaaaaacagaaataagaataaaaggtcttatcctcataattaggaaattttaatcgaaaacaacacacatgtacacaaaggtgtatctaataagcaatatataaggcagtgttaagattacagtgctagcctgggcatcatggcaaaacaccaactctacaaaaaaatgcaaaagttagcagtgcatggtggcatgtgcctgtagtgacagctgcttggaaggctgaggtgggaggatcacttgagcccaggaggtcgaggctgcagtaagccgtgattgtgccactgcactccagcctgggaaacacagcaagaccctgtctcaaaaaaaaaccaaaacccagcactttgggaggccaaggcaggcggatcacctgaggttagaagttcgagaccagcctggccaacatggtgaaactccgtctctactaaaaatacaaaaaagtagccaggcgtggtggctcatgcctatagtcccagctactcaggaggctgaggcaggagaatcacttgaacccaggaggcagaggttgcagtgagccaagatcgcaccactgcactccagtctggttgccaagagcaaaactctgtcttgaaaaaaaataaagaccgggcacagtggctcacacctctaatcccagcactttgggaggccaaggtgggcagatcacgaggtcaggagtttgagaccagcctgaccaacacggtg

SEQ ID NO: 723 - DNA, 98 bp, Homo sapiens
gtagagacggggtttcaccatgttgggcaggctggtctcaaactcctgacctcaggtgatccgcccgcctcggcctcccaaagtgctgggattacagg

SEQ ID NO: 724 - DNA, 21799 bp, Homo sapiens
tcacctgctcaggataggagactccgctggactggcttccctgcttgtgaataggaaggtgctgtgaacagtcagtatctacagaacctcactgtgtttaactctgccctccagccttccattgtggtttttaattcaacttggtttctcctccctcctttctctcctcagccattgatctgatgtacggaggcatctactgttttctgtgccaggactacatctatgacaaagacatggaaataatcgccaaggaggagcagcgaaaagcttggaaaatgcaaggtttggttccacctcagtttacctgcttgatcctgcagttccctcatgtccatcaagggcagacccagtaggagaaagagaagtacctaggtgggaagtggcaggctggtgggaagaggccgtccccaccttcccctaaggcccacagtggagtcagctgaagctctgcatgacaggggaggtggctagtgtcgaggcatgcatagctgcccgtgtgcttgggaccacttccagggtgcttcccttgcaggtcccccatgggcctgcagctgggccaagggaacaaccccagcattacttaagctctcccagggcgcacctgcagatgtggggctgaacgagtgtggcgaggtcacacctctcggggacaggtgactccgtatctggacatccctgagtggtttgccctcagctctgccgaattctagcaagcgatctctttgcagtaatgttatatgtaaacatacctccttcctcccaggagagcagactattttcggatcaagttgtggtagaatctcttttaaaactctggactgtttgggtgatgttaaatccatgtcaacagcgtgcacccaccagatggaaactagacccaccagatggaaactagacccaccagaaggaaactaggagagtctcccagcagccccactgcacagtcagatccttgccatcttgtgagctgccctcacggctctcgcaccagtgtgggttttgcacttgccgtcgccaccgtgtggccacacacactggttattggctacacagagtgagaggagcaaacatgcagtcattttctttattttttatttcttcttggcttccctgagttttttttcctttttttttttttttttttttttttggtttttgattctgacagatgctcatagtggttgacagtgatagtgacatagtgacaggtgtggtttaccccagttgacaggtgagcatctgatctccctggtagcaaagccatcactgtttgcaaaggaaacatatgaacctgacacctgttttacattcttgccttgattactctccattgaaaacaccccagtgttttgagaagggaagaatagcaacaggggctctttcagtgagcagaattatttgtgtttaacaagtcttctctggagagcaatctctgacttgtgttcgctgttcttttccctctcagaaatttaataacattgtgactaagtgtgggtgtattattctgtgcagagcacttaaagcacgggcctaagaaatgtatgtccaggattaaaatggaattcttctagaatcattttataattctgtctatccaacatgctgtgtcttttaaagtattttgaagtattcagaaatgttggttggcatggaacaagtacttctgagcgcatagggtgtgcgttgaatggaatactatgccaattagcatttaccaccactctctgaatattttgtggcacacacgtttttaactgttggatctatcttagtttggtaactcgacgctgagtttatgctatttcagtttgctgaaaagtgcaagctctctccttcaatttcacttgtttgcgggagaatccttcatgtaagttcccattggtgctgatgctgccatctctgtgctgaaggatggaagacatttgaaaaacaactgttttggcattggcgttggggtagttttgactggaggtgctgcttttcttgcaggaaacgtagctcacatcctcataccctctgtgagaagctcctttaagtgttgtgtgtagcccctctcagcacagtagagtttgagaaagccctggtgctgtggatgttgctcactgaaatgcaccctgacagacagcatagcgccacagcttttatgtgtaaacacacttgatgtgaaaatctagctaatagcgcttggaactgtccttcatctgcttaggcgttggagagaagttttcaacttgggaaccaaccaaacgggagcttgaactgctgaagcacaacccgaaaaggagaaagatcacctcgaactgcaccataggtgggtggagcgtgtcgtcactctcagctaggcttctttccagggtttaaaagtaaatacagaattgtgggtttcttaagtccacatgattctgttgaagccctgcataactgtcactcatcaatgtgctcagcaaccagctcttgagcacctgttctctgcagggacctgcagtgggcttggggcgcagagtgatgcgtagcaacagccctgccctcacagccttcagcgtctgtgtgggtaaagggactcaagttgattttggccagggtgaggctgggcacagtaatcttcagggagagaaatgatgtgtgtgagtgtaagtgttcgctgaattttctacaaattgagggaataccctttaaaactttttctttttcttttttgagacagagtcttgctctgttgcccaggctggagcacagttcactgcaccctctgtctcctgggcccaagcgatccttccacctcagcctcccaagtagctgggattgcaggtgcacaccaccatgtttggataatttttgtgttttgcgtagagacatctcaccatgttgcccaggctggtctcgaactcctgggctccagtgatcctcatgccttggcttcccagagtgctgggttacaagtatgagcccctgccctggccctagaacatttttaaaaacctgttttgtttgttcattaggcttcactctgacctggcctgttgtcgtagaaactatatttgtgtaattctgtcaaagcatacaatggctgaagtgggaggggtccatggtggtggacattcttcaataccgttcatgtaaaagtggcataaaaactagcagaatgcgatatctcatcgtgttctggcttgaatgaatgaataaaagaaaatgagtatgtagaggtagaggaagccgctgggatccagcgacacctgtggttcagcacacaggtaactcctgctctctggtgatttgtgtccaggtctgcgtgggctgatcaaccttgggaacacatgcttcatgaactgcatcgtgcaggccctgacccacacgccacttctgcgggacttcttcctgtctgacaggcaccgctgtgagatgcagagccccagctcctgtctggtctgtgagatgtcctcactgtttcaggaggtgagcgccattgacttctgcaggggaacatttctgttactttgttttcaccttcaaaaaaaaaatttaaggtggaccatgataaaggaagatacatttagaaccttttgtagtaagttaatgtttaatatacatgtctattatggaaaacacagttttccaaaaagggaagacctggcgtgatttttggggacgcactgctgactcagaacaaggagaagccctttgagaggcttgtggcagagacttccctggtgggtgacatttgtctctaaagacgggtgattctcccccttcctcttcctccatggtctaccttcctggctcagaaaggcacgcatgtgtcaccctcctgtgtcctcctggtatgcgagtctcctccaccgccaggtctctctaagcatgccccatcagagcctctgtcctcatgagctacgcgctgcacgttggctgttcctgtgggctgcacgtgtggcgttcctgtccacttctgtccccggcatcagagcatggcagcgttcagagcaaggcgttcacggctgccgcctcagccctcaccggctccgtgacctagacatgcttctcagagctgaagcagctcagttacctcaactaataagcaggctggtgcctgttcttcaggtgccttgcacaggagccagccaacagccctggcctgttcccattcgtaacctctgcgagagatgcagccacgccagctcactcatgtctgtctggtcactggtcgcttttgtgggacagccacagagttgagcagttggacagaggctatccaacctgcaaagctgaaattatttactgtccaagcctttcaaaaacagattgccagcctctggtcgagcctaaccgatttcctcaaagtacctgcaatgtgccataactgctggggacacggcccaaataggagaaaggagggtgcagctgggaagttggtgggtggttgtatcactgactttagtgataagctcacttgtgttagattgtttttagactccggcttgttaaggtgtaaattacagtcacacccaccttctagcctatagatagatgagtttcgacgaatgcatagttgtgtaactgctgctactcaagatgaagaactgttacctctccgaactccctcgtgcccctccgaagtcaacccccagtccccagaccctggtagctgccgatctgtcttcggtcccttgagtgtcctttaccagcgcatcatacggatggatgcatgcaggaagtagcctttctgaatctggctgtccctacttaatgtaatactgggtggattcacccgtgtcttgcgtgcatccatgatgtgtgctttcgatgtctgagttgggttccattatgtagatgggttatggtttagttgtctgtttcccagttcagacacatttgggtggtctgtggttttgggttttttgatgagaaataaaactgccctgaattctgtatttgcacaggcaagacccctctgtgggttctgacctggggaggaagccgtgggatggaaggtgtgctgctgggtctgcggctggagttgagctgttggagaggactggctggcaagccctcagctaattgccattagcctcagaggcagagaatcctgtggctgatgctggtgaattctgcataatcacagtgatgtgcttccctttgcggaggtgctggtgtccatgggcctgagtggtttggctagtgctttgaggaaactagtattgggcaaatcgagtcacttttatttgcatgtgatctcatagtagcaagtcataattcattttttaggcttatatgtggaaaactagatggtagaaaggaaaaaattcatatgaggactcgaaaagtccagtgagcccagataaaaatagactttgcaaaaagtagaaaagtaaaatccaaacatttgtgtcaaatgagccacagccaatggtaggcatctgataaaggttttgattgtgtgtactctgtgttcagagtctacatttattcctgacaaggtttccttccccgccctctggcagttttactctggacaccggtcccctcacatcccgtataagttgctgcacctggtgtggacccacgcgaggcacctagcaggctacgagcagcaggacgcccacgagttcctcatcgcggccctggacgtgctccaccgacactgcaaaggtgggccctgggctctgcaccctccaccagggcaggatgttttccttgaaggggaaggaagcaaagcgagtgtatgactcgtgcaaaaaggggcacaggtgacacattccattgttttgtcatcatagcccttgtcgtcatttgtttctgaagtcaccataactaatgacctcagagaggctcctcctagtttatttttaagaggcgaggaagtagttccagcagtatgacaggtcctcagtgaccgatcacagtgaacagcaaactcttggagccctcttgggcctgtgctttgaggcccctgcctgccctggcatttctgggaccctgtgggttatcaggcctgaggcttctggacatcccccaaacacaacttaatcacccaactgtctccttcccattggggactctccaaaaggactgatggttgctctgaaatagccagagagctgggacacaggacgagcaaagcttctcttggggtctcattggacctgggccatctcccccaacatagtcccacagcctggccccagggtggtaccctgatgatttttcagagttgtgtggtgttggtagttggcaggggcagctcttagcgctggaggtgggaggctgggaatgaatgacttgagccaagatcggctcctccccactcctcatggtggagatcccagtgtgagggacctgcagctgaagtctatccatacaggcagagagactgagaggtgattctcagatgagtgtgggctggtcacttgcaggtcttcctaaagcccgtgctggcgtttctgattcagcagatctgtggggggcaggggcttcttcactcttaatcagttcccagctgatgttgatgccgctggttcagatgccatactctgagaacccatgcgctcaggtcacagggcacctggctgcttgtgagtttcctgtggtctctgggctggcacagctagttgtagccgatatcctatcagttaattttaacttggagtcttttagagaacagagtcctgttctgacggttcaccgagttgaacagcttggtgggctggccttcccatcgcttctcatccgtctcaaggctgtgcacccgggccctaggcgcttacgtacaacctatgggttctgagatcacagcccagaaacaacccacagttgagctaaaatggctggttttggtcaaatgtgactttgggttctgttttcttttggtacttactttttttcctctgaaaaactacgtgatccttttaattcttacctagaaatcaaaggaaagttacttagtagcttaggtagaatttcatgtcctagtatgatttataagagaggaaagagccactgtggaagtgactatgctgttaccccaagcacctagtgagaataacgaagagccttctgtaagcagcagaaagatgttctaaaaatcacttgttcaaaaatgcattgctgttaaatgttcacatgacaaaatgtgacctctgacgtgcttctgacagaattcccttggaaatgtctgaaaagaaatgtaaggttcttctgtttagaaacctggttgccagagctgttcagcgaggtggcctggccacatggccttggttacgtgcattttgtccttgtggccttcacggcatctttctgttcatcttttgttttgttttgttttgtttttgagtcagagtctcgctctgtcgccaggctggagtgcagtggtgcgatctcagctcactgcaacctccgcctcccaggttcaagtgattcttctgcctcagcctcctgagtagctgggactacaggcgcccgccaccatgcccagctaattttttgtatttttagtagagacggggtttcaccgtgttagccaggatggtctcggtctcctaacctcgtgatccgcccgccttggcctcccaaagtgctgggattacaggcgtgagccaccgcgcctggccattctgttcatcattctttgcgccttcctgtatggatattcttgtcctctgaattttgtcccatgaatttgagatccctctgggaagcatttttctctctaatcttaaaccttctgctctcagaagacttagtggcccttctctattcctctgtcatgattcaacgtctttgaactgtgatgtatatacaggtgtcctcgtgccctgtccccactgtctagtgaagttatgtagaatatgtattccacacacgaattaagttctgctacttaagtttctttttcacagatctgcacacatggatatgaatgaagtgtgtattgaatagagagggtgggagtggcacttccagatgcaactgactggaagacacgctgtcccctgggggctctagctgatgaggacagcctgtgtcctgcggtgtcactttctgaacttggggcaccatgatacctactcagggagggaggttgctggggcttccccgggtgtacctggcccaccatatgttcagctgtctcactggaacaatattgattcagtcattctttatatgataatgggaatcgattattctgctcagtcactgggcattaggtgggttttcttggcaagactgaagctgtggggctcttgttagggaatgagaaaaaggagcattgaaaatccaagtgctgtgatttctcgtcatattaaaataacaaggacaccctctgctaaaatgaggagtgtcctcacatggccttttaaagcgttggccctggctcccccaggcttctgcagggtgaactgctcttcccttagagactccccatatttggggagacactaatcccagagccgtggtctgtctccaggtgatgacaatgggaagaaggccaacaaccccaaccactgcaactgcatcatagaccagatcttcacaggcgggttgcagtcagacgtcacctgccaagtctgccagtaagtgagaggctgcgtgctcggcaatatcaaaccctctggggccgtactgacatcctcccagtctccagagctgtgtgtgctctgagaggtctttaaggaggctatgagataaatgattaatagacgccatgagagcgaaggttgtggggtgggggtgcttcctcttggggaggtcgtagggcaggtgtcccctcgggatgcgagcccttcgtgttgaggtcttggctgttgtctacagccagcagtgtgttcttggaagcttcccctaccattttgcatcttacagtccttgaccagggaccaagtgaaagagccctcttcaagaaggcgtggatcatgcatggtggattgtttttctacgtgcttcgaagtgtgttagttttcattattttatggtttctggttccattttctgatgtagtggccctaattcttctcagatgtggtctctgcttagagcctcaagtgttgagtgcagggagaatccattgctttgttaggtcaggggaccctctcacccaacctcagtgcatgctacaggttttttgtttttgtttttgtttttttcaggcatggggtcttgtgtatgttgcccaggctggccttgaacccatgggctcaagcgatcctccctccttagcctcccaagtagctgggactacaggcatgggccaccgtgcctggctctgttctttacttcagttgaagtttaaaaaccctggacatgatccaccgaaattatttcagaacccgaaatggactgtcacttctaaactgcataagacgagcaaatatcgggaaaggccagtgctgcctgtgtcacgggggccattttctataaggagcatagaccgtttggggccttgtctctgagtattagaaaccgagtttgctctgagcaatttggacctcctcgctgtcccttaactactgaattccattagtaggagattgtctcaagatttaaatcctgtataaatatcgagagtaaatttcccagtctgcaagttttcattttttatattgttaaataaatttctagcaaggaactggccttgtgaaatgcagcattgactgtccagtgcaggccaccgggcctggcctgggcacgctctgtgaaatgtgcaggggtctccagtgttgcctagggtcacaggccccaagttctagatgcagctgagatagacctgtggattcagagcctctgacagggcccatgagtttatcctcctcccaagtccctcagtgactgtgatggtctccagactgggaagtccttgcttgaggagcgcccctcgccttccgagttcacacacacccctccccagggccaccttgggagccaggacacgttgggtgtgagcactgctgctcttgctcctgccccatcccacctgagtgtcactgtgacaaagggcacagcggggaagggatgtgggaacggcttccaccccgggttgcctctggagctgggtgggtgtcagtcctcacagccattgttttccctctgcttccagtggagtctccaccaccatcgaccccttctgggacatcagcttggatctccccggctcttccaccccattctggcccctgagcccagggagcgagggcaacgtggtaaacggggaaagccacgtgtcgggaaccaccacgctcacggactgcctgcgacggtgagaggcctgcacccacacggcgggggcgtgtctcctggccagaaggctgtgctccatcaggaccaaagcagggctctttcacatgcccaggacagagcctgggcaaaggtgcagcatgagcctggattggctgcagtctcttgtgctagtttgtcctttgttttggccagatgactcaatatttctgtcccccagcttcgcacagcaccaggtgtcagtgtcagcagctgctactccaacctccgcatgtaaatgaacccagagccaaactggctgctcccttagcccttgcactaatcacctaccccggagtgtgagctgagatgcgcccgggcctctccccatggtccacggccttctctgcacatgattaaaacttagttgtgatgttctgtactcttagggctgtttttgaaattgtgcatgtactgcttcatttgggataagtaataatatttacaaagtgatttttttttttttttttgagacagagttgtgctctgtcgaccaggctggaatgcagtggtgcgatttctgctcactgcagcctctgcctttcaggttcaagtgattctcctgagtagctgggactacaggtgtgcaccaccacgcctggctaatttttgtatttttagtagagcgggggttttaccatgttggccaggctagtctcgaactcgtgatatcaggtgattcacccacctcggcctcccaaagtgctcacaggcatgagccaccacacctgtgagtgatttttaaaaaaaaatgtatttaagtagctgtagcatacaattgtaaagacagcagaaaaccttcctaaaatttgtctattattttatagcctttgttttatttgcatcaattaaaggtaatgcagaagagtccttgttgagtggaagtatcccttagaagaggtacgagcctttggtttctgtctggctgcatagtcagcacgaccaaagttgcatgtttattttgttttttgagatagggtcttgctctttcatgcaggctggagtgcagtggtgccatcatagctcactgcaacctcgatctcctgggctcagcctcagtgtccagggctcagccttggtctcctgtctcggcctcctgagtagttgggactataggtgtgtgccaccatgcccagctgattttgtgatttttttttttttaattttttttttttgagacggagtctcgctctttctagagtgcaggctggagtgcagtggcgcgatcttggctcactgcaacctccacctcccaggttcacgtgattctccggcctcaacctcccgagtggctgggattacaggtgcttgctaccatatccggctaacttttgtatttttagtagagactaggtttcgccacattggccagggtagtcccaaactcctgaccttaggtgatccgcctgccttggcctcccaaagtgctgggattacaggtgtgagccagcatgcccggccaaccaaaacctttttaaagaaagtctttgcagctaaattaaatttaatcataaattccaataaaatgaaagctttgccaaaacagcaggccatgaggtagaaaccacacttcacaaactacaatgtgtgggaagcctgtgttgttaggagagacatgatgtggtgctgactcccgggaaggtggaggagaggtagagtgcacccgggtccccactttgtattgcaagcaaaggctccttttcgagtcctttggagagcagatcacaaagctagcaacgaaacaggtgcagctttgcccagaggccccctcgtcttgccctagttaagatggcagaatttccagagcataaataagggctttccatacctgcttgtgaaaagagtgaattttttgctggtgtttcagcttcaaaatttggcgtgtgctttgttgaatcatctgttctgcaggttttgtcagtggcagctgacacctgtgccagacacgcttctgatgcagccctcctacctcctgcctctgcacggtcaggaaattacctttcccagtcctcttgcctttttttttttttttttttttttttgaaatggagtcttgctcttgttgcccaggctggagtgcagtggcacaatctcggctcactgcaacctccatctcccaggttcaagcggttctcctgcctcagcctcctgagtagctgggattataggcatgcaccacctcgcccggctaattttgtatttttagtacagacggaatttctcttatgttggtcaggttggtcttgaacttccaacctcaggtgatccacctgcctcagcctcccaaagtggtgggattacaggtgtgagctgccgcacctggccgacctctcacctctctacattaaactgcttatgttgagatcattgtagattcacatgcagttgtaagaagcctttaggtaccctttaccccggtcccccgatggtgacctcctcagcactgtggtgcgacgccctggccaggattcagacattcatgcggaaagtacccagcatctccagtgcctcctccctcaccacccactctgtaaccgcagtcaccctggactcctgcatttccatacgcctgacaattccagaatgtcatgtcaactgaatgatataacggaaccctttgagattggcttttcttgcacatcctaattctctggggacgcatccagggtacagcttgggatcagtagttccttccttttttgctgctgtctcatactccatggtacagtgttccacagtttctttaattattcagccatgggaagaaacggggtgtttccagttttgtgactctcgtgagtaacattctggtgcacatttgtggacagtttgtgtgtgaacattagttttcatttctctggctcaaattcaactgctgggtcatatggtacttagaaaattattaccatttccccaggcctttcctggaaaaaaaatatttaagataaatattctgtagagacaggcagcaaaggtggacaacattttctctttttttcattgtttcatttttagttgtaagtgtatgtttttggtagggaaatcaacccaatgaaagagataaaatacctctttcctctcatttttctgtctcttgcatctcccttaccgctcctgtcttttttgaacgcctgtagattcaccagaccagagcacttgggcagcagcgccaagatcaagtgcagcggttgccatagctaccaggagtccacaaagcagctcactatgaagaaactgcccatcgtagcctgttttcatctcaaagtaagttttccagaaagccaactctaatggcagacttagtttttagtccacagtacggtcctcagccttttggtttgctgtgcagttacattttttataattgcagcaagcaggaagaacaccgaggaagggagggtgtgagggaattgtcctcccatctgtgaattgtccttttgtctgtgctgcggtaaacaaaatcagtggcttcgcagtgaaagtagaatgtgagttttcttgggagcagagtggttgtgaagtttttattacttctaccattcctccagctaccccctcctcaggttttctgttttattttaagacaaaggccctcagcatgcagatctggtccaggagttggcaagctctttctctaaaggcccagataactgaagatgtcgagctccacaggctgcgtgcgatcatacgattctctgttacatgttctttgtttcatttcaccaccctttaaacatggaaaacgcccattcctagcttgctggctggaatgggtgactcctgatctaggcaaaggactgtcttctgtctggtgaaaggaacaatttgttcatttttgctgccatgggccacggatctttgttttgttttctgtgctttgctgggtttgctgtaagattactttttgtacccttggtgttaccactgaacagtcccatcatttgaagacttgaaccctgtaaatgaggacttgggtggattgccactgtgtttttgaatctgtaattctagatgtagctacaaggcagttcaataaaatacaaaagagataacacagacacctgtcatcagaagaaggccctgaagcttccagtgacatttctgatcttctttcctcttccctctgtccccttcctatttctgcagcgatttgaacactcagccaagctgcggcggaagatcaccacgtatgtgtccttccccctggagctggacatgacccctttcatggcctccaggtatgtggggttgtaggcccgttctgtgtcctgaggggctgtgatcctatcaggacaggaatccagctcggagctcctattaagatgactgttggccgggtgcagtggctcccgcctgtaatcccagcacttcaggaggtcgaagcgggcagatcatgaggtcaacagattgagaccatcatggccaacatggtgaaaccccgtctctactaaaaatacaaaaattagctgggtgtggtggcaggcacctgtagtcccagctatttgggaggctgaggcaggagaatcgcttgaacccaggaggtggaggttgcagtgagccaagatcgcgccactgcactccagcctggtgacagaacgagactacgtctaaaaaaaaaaaaaaaaatgactgtcgatactaatataaaccccaccttccccaaatctgtttatcctgatcttaagatacagcacatgttaatgagttgtttttcatcagataccctgtttttgttttgaatttctcaacaattatcaatccactttcaaaccggcaaagtcctcaaggtgggatcacagcgagaaggcaacattttagttcgtggaacagatgttgaagtacaggcagacatagttggttttgcagttgtagattgcattttccttttcaaatctgcctattctggggtacttggaattcagctgcttactaatgcatgagacacataggagtttcctgtggttctgtgacaaatgaccaaaaacctggcggcttaaaattaatttcctcacagttctagaggttggaaatctgaaatcaaggtgttggcagggctccatgtcctacaagggtcttggggattccattcctcaccgcctccagctgctggtggttccacgtgttccttctgtggctgtcactcccctggcttccgggtcacatggccagctcccctgactctgtgtccagttccctctgcttctctgtcatgaccgtggtcattggctttaggacctaggcagatcatccaggaggatctcatctcaacatctttactttgagtctctgcaaagactggttttacaaatgaggtcccagtctcaggttctgagggttgagacgtggatgttgttatttgcagggtgttattttttggtggccacagtcccagccccagcaccgtggaaagcatgttgctttttggtagttagcggcctcttcctggtgtcctctcatggctgtcccacccctgtggcacacagatgacctcctgaataaaacaagaccagagtcagagctccatatcatcagtctgaccacgatggtcacgtactgagggaggtgacagtactgttctaaggtcagggtctcaaagatcttggtgtttcctgccaaacacagctgtaggaaaatgcagtaaataatgtgcatggcttcctgttcccagcactcctctcccccatctcaccaggggaggtgctggtcatgaaataatgagcagcaatctttgtcccttttgaggaggcacctgcctaggttgtagaatggattcagcgtaccctttcaagctaaccctttacatgtgggaggaagagcaccttcaccatctgctttgtcacaaaccaaactcacattcctccagatccagctcccattaccagccctattcaggacccaccttggaagaaccaggggccacgccaggtggcctcaggacccaggtgtgctctgaggcaggggcctccacagcttgagcgtcagtgtcctcacgaaacatggggagatttctgcctgaagcataaagtgcacctcggtgcagcatctgcatggtcaagcttggataagtgttggtttcacgagagccttgtgtctctgggcctgatgattttaatgatgctgaatcctgccgttgtctgttacagcaaagagagcaggatgaatggacagtaccagcagcccacggacagtctcaacaatgacaacaagtaagtggtgcttagcggtgtgggtgtccagggcctctggccaagagctgggggtgggctcctgtctgccttgtagggcgcccagggatcccccgccactgacctgcttcccgcttggctgcccgcagctccactattggtgcccgcagctccactaggaaaggccgctccacgtggtgccacaaatgctccctcctgttggaggagcccagccccactcttgcctctggcaggagggaggttccatctggaaagctcggtgttcattcttcttgccttggggttgtagaaagtatgaaaggctggggtgttccaggatccccactgctgactgcagtcaccactcccactagatggagttccaggaagcgcctggacccggctagagccaaggggggtgaccaggctcccttagttcctgcagcctcctgtgcatcagcctgaggccctgggggttgacagcccacaggcctcccgctccctgcctgggctgcctggtttctgatggtgatgacctcaagtgacggcatcaagtcacctgcgccctccctctcctttgctcctgcactaggtattccctgtttgctgttgttaaccatcaagggaccttggagagtggccactacaccagctttatccggcagcacaaagaccagtggttcaagtgtgacgatgccatcatcaccaaggccagcatcaaggacgtcctggacagcgaagggtgcgtcctgtggggtgggaggaaggccctacggtggctacggtgcttcccctccggtatagctgagactagcccatgtctgagcctagaaccactcgaaggtgttgaccttcatttgccgaagtaatgaagcctgttctggataggatgccagcctcgatgggtgctcaggtgggagaagaggtgcctgagcaaaggccctctctggaggcattcccttagcacagagaacgtcagagcagttgttttttaactgcgtgaactgaacacatcagttctttttttttttttttttttttttgagacggagtttcgctcttgttgcccaggctggagtgcaatggcatgatctcagctcactgcaccctctgcctcccaggttcaagtcagtctcctgcctcagcctcccaagtagctgggattataggcatgcaccatcacgcctgcctacttttgtattttagtagagatggggtttcaccatgttgaccaggctggtttcaaactcctgacttcaggcaatcctcctgccttggcctcccaaagtgttagaattacaggcatgagccaccgggcccggcccacatcagttctttatcagctcctctcctttccagtttcattccttcatggcatagagaaacctgttgaccctccaggggtcagggggaccccagctgccatgaactccctgagggctttgcacttcacattctgagcaacacggaagccaagccctcttgagaggttttatttggaagaatctgggataaaggacagccttcagggcgatgaggtggatctggacggagccacttgaaaacagtgggctctgcacaagggtggggctgtcacaagtgggggagaggctgtgggaggttgggtgaggcaatgggtgacctcgtggcaggtgggggtggtggtcgggctgcagagatgggcagggccagtgccaccagccagtgaagcactctttcctccttgcggactaaaaagccaaaaccatcaactcgggcctggccgacctgtgcagagcgcagagcacgtaggcttttgtgtagggtgggttgttctggctcctgtcttaggagttagaggtgagcctcctccctctctctgcctccacaggtacttgctgttctatcacaaacagttcctggaatacgagtagccttatctgcagctggtcagaaaaacaaaggcaatgcattggcaagcctcacaaagtgatcctccctggcccccccctcccccaagtctcccgccgcctccccggcctggtgacaccacctcccatgcagatgtggcccctctgcacctgggacccatcgggtcgggatggaccacacggacggggaggctcctggagctgctttgaagatggatgagatgaggggtgtgctctgggtgggaggagcagcgtacacccgtcaccagaacatctcttgtgtcatgacatgggggtgcaacgggggcctcacagcacagagtgaccgctgcctggcgttccccagcactcggtgtggaaaggcccctacctgctgtaagattatgggtccatgaaagcagtaagctggacacagaggtgtagtgtgcgggacagagggccttgcagatgcctttctgttggtgttttagtgttaaaatacggagagtatggaactcttcacctccattttctcagcggctgtgaagcagcctcctagcttcggaagtacggacactacgtcgcgttttcaagcgtgtctgttctgcaggtaacagcatcaagctgcacgtggaagcatctcgcggttttctagaaacaggcattttcttatccctctcccgctcctttttccacaaaggtgaatttcataaatgtaatactagtaaagtgaatgaattactgagtttatacagaaatttaggtaacttctcctttagtctcaagagcgagtcttgctttttaatgggtgccgtttatgttgctgcccgccctgtgtgcctggctcctctgggtgccttggtgtctgctggtggctggcagtgggcgcagcggaggagagttgtgctgcagctcatacggtgtgtctgtcatctcagtctggagtaaatgcagtgtctgccggtgtctgatgggttctgtccctcgtattttctttgccttctatcccattgcctggctaccgctgcctggcagccaagggtgttggtcgcgaagctggagtggcctctggtggagcctgcatcttgtctcgtctgcctctgctttacatttggtgtactttcgggcgtggtggcagtaaaatgacaccgtgattgagcttgtcagcagagctgaaagagaaagtagaaggatgtgcattgtttcttgtaagatatcttgcatgtatctgtgtattcaaattcaaacagagatggtttgtccatttgtccactgagaaattagaaactagggacaagggggaggaaaagtactgaaatacagtttatgaagcaagtgtgtctcgggctgtgcttgtcccaggagccccagcagcatctgaactgaggcttcttcagtcctgcaggaacaggatcatctgtctcagcggtgggcagatgttttcatagacagccagggagtaaacactgttggctctgtgggctgtatggtctctgccataaatagtacagagatgtggctgtgtctagtacaacttttagacacagaaatctgaatgacatatattgttctgtgtcaagaaacttagattttttttttaactatttaaaaacgtgaaacctattcttagctcacaggccatggagaagctggtggggaccagacccagctccttagctggctgggctggggagggggtagtgacagtggcagctgctactcactgctcagtgtggaaaacacaggacttggcaatcacagcccgcagaaccatcatgtgtggcagaagcctgagggatgcggtttcttgcccacgtgctctgttcattttctgttgtttttctgcacttaaagaattcacatggaagcatgttttataaaatgaattaccagagaaacagagatgggccgagattttcagaaatggtcccatgtgaccaagttctgctgtttgggtgacagtgctttgaagatctcctttgaggatgtgcagtctttttttttttttttttgagatggagtttgttgcccaggctggagtgagtggcacagtctcggctcactgcaacctccacctcctgggttcaagcagttctcgtgccgcagcctcccaagtagctgggactacaggcatgcaccaccacgccaggctaatttttgtatttttagtagagatggggtttcaccatgtctcaaactcctgacctcaggcgatccacccacctcagcgtcccaaagtgctgggattataggcgtgagccaccgcacctggcctatgagtggtcttttaattaggaacaaatctaatggaaaggagagttgactgaagttggcccacaggattgtgagctgggcagtgccttcatgaaggcttgccaccttgggacgccccagtttactggggtgtcttgcggagtgcagaaggctttctggcagctgcctgggtttggccagaccctgcctcccctcccgccggccaacccctagtccccttcctgtctccacttgcattcaggggtggctgctgttctgagaacattagaactgggaagagagatggagtcacatggatttttggtgggcattattctaaactttcgtatccaagttagtcccccttattccactgtggcattgccgttctaagcagttacctgatgcctgctgctgaagagctgctcacaggaggcggcggcggccctggcactgccccttgcattaggtcttgtgtttgatgtgttcttgtgaatttactttgtcagaacaaaatatttacgcgttgggttcaggaatttcttttagctccccatctggctgtgaaattcaggaaacctcccgttgcctagtaatcaccccatgtaggtgtacattgtgacaaagtgcatctgaccactaaggggcccccttggtgaccccagcacattcacagcagtgttaaaatggcctgcattttggagatgctggctggcctttcagtgcctcccaggaagacacatggcctttccctcttcagatgcctgaagggagtgctttgaggcaggtgatgtgctgggagtgtgggcggcctccctctggccccggggccctctgtggaccttggctccctccgtggacctgggcttcgtggtgagcactgcagcctccctgggcattccctccagcgccagcaccactgcaacatatagacctgagtgctattgtattttggcttggtgtgtatgctcttcattgtgtaaaattgctgttcttttgacaatttaagtgattgttttgtttactgtaagtttgaaaataaaaatgaagaaaaaaattccaatgactgtgctgtggttggagactttatttaccaagatgtttactcttcctttccccttccattttgaggagctgtgtcactcctcctcccccccagtgctttgtagtctctcctatgtcataataaagctacattttctctgagaa

SEQ ID NO: 725 - DNA, 232 bp, Homo sapiens
tttttttttttttttgagacggagtctcgctctgttgcccaggctggagtgcagtggtgagatctcagctcatagcaagctccgcctcccaggttcacgccattctcctgcctcagcctcctgagtagctgggactataggtgcctgccaccatgcctggctaattttttgtacttttagtagagacggggtttcaccatgttagccaggatggtctcaatctcctgacctc

SEQ ID NO: 726 - DNA, 30826 bp, Homo sapiens
acgaggtcaggagatcgtgaccatcctgtctaacacagtgaaaccccgtctctactaaaaatacaaaaaattagccgggcatggtggcgggcacctgtagtcccagctactcgggaggctgaggcaggagaatggtgtgaacccaggaggcggagctcgcagtgagccgagattgcaccaccgtgctccagcctgggcagcagagcgagactccgtctcaaaaaaaaaaaaaaaaaaattgggaaacccctacctgtctgtacctgtaggtcttttctctggggtctggaagaagaatccttcaatatcttgccttctggtaatctgagagcagggcgagaaaaggaagatcagagttccacccttaaatctgtaggttttcactcccccactctcctttgcagtcccgtggagtctccatctgagccctttcctagtccaggcatcccgatgttggtggatggcccatctgagcggccagccctgtgcttcttgctgttggctgtggcaatgtctttcttcggctcagctctatccatagatgaaacacgggcgcatctgttgttgaaagaaaagatgatgcggctgggggggcggctggtgctgaacaccaaggaggagctggccaatgagaggctcatgacgctcaaaatcgctgagatgaaggaggccatgaggaccctgatattcccacccagcatgcactttttccaggccaagcatctcattgagagaagtcaagtgtttaatattctaaggatgatgccaaaaggtaaggtttggaaaggggtggcttggggtgctgggaaggtagagggactcatcttggggctattactgtgcttgtggctgttgctattctagatggagcagagaaagcctcactcagctgttctgctcctctgtccttatgggtagactaggaaaagggtgttgaaaaccaaaacccctgcttcctgggggactcgcagacagtcaggattggaaaagcatccagccctgagactttgctattccctttttagttttcccaggggctaagctaccacataggatacaatgtgatatagcatcctggagtagtataaacacacctccatgaaacatgaaataattagcatcccgcacatataaatagccaggggtggtggtgcacctgtaatccgagctactctggaggctgagtggagagtatcgcttgagcccaggaggtggagtttgcagggagctatgatggcacctctgcactccagcctgggcgacagagcaagaccctgttccccaaaaaatgttaatttttttttttattaaaaaaaattttttttgagacagagtctcactctgttgcccaggctgaagtgcactggtgtgatcttggctcactgcaacctctgcctcccaggttcaagtgattctcctgcctcagcctcctgagtagctgggattacatgcatgaaccaccacacctggataatttttgtacttttagtagagacggggtttcaccatgttggccaggctgatctcgaacacctgagctcaggcaatccacactcctcggcctcccaaagtgctgggattacaggtgtgagccactgcacctggccaaaaatgttaatttaaaatgtaaaaataatagcagcttgcagtttacaaagacttaacacctgttttttttttttctttttttttctttttttttttgagacggagtcttgttctgtcgcccaggctggagtgcggtggcgtgatctcagctcactgcaacatccttcttccaggttcaagcaattctcctgcctcagcctcccgagtagctgggattacaggcacatgccaccatgcctggctaatttttgtatttttagtagagatggggtttcaccatgttagtcaggctggtctcgaactcctgacctcgtgatctgcctgcctcggcctcccaaagtgctggggttacaggagtgagccactgtgcccagctgtttttttttcttttaatgttataaatagagatttaaaaaataataataatcgtgaggtcagtaaagtagcatccccagttgctgggaggcataagagggtgtctgggggctcgtgtcagggccaggggctggatgggcacaagaagcgcagagggacagcatgcactgtgcctaggggagcaaggggcacagctggtgtctggtggggaggacaagcatggggattcaactggcaaagcctgcaggccagaagctgtacagacacaggcccagcgcaggggatgaaaagccagtgggagaggagttgaggggcaggatgagaggatggaggacaagtgtgtgaaaaggaccgtggccctggggctcatcccagtgtatcccgtcatgcagtgttgggtggcctcattgaaaggcctgggctcccattggagagctagaagccaatggagccctgacttgaacctcagttctctggttccaagcctgatgccctctcactctcccatgctgcccctcttggacaagatcacccctggctcctgattagtgagacatggaagccccatccttaaactagagccttaaacaagttccgagaaacatgtctggacagaaatccttctgcttgcacgtcttcttgtgatccacactgtccccaagccccggagccctgggatgggacttcacccctttgtccccaagccccggagccctgggatgggacttcacccctttgtccccacagccccagagtcctgggatgggacttcaccccctcctttgtccccaagccctggagtcctgggatgggacttcacccctttgtcttcaccattcttcttccctctccaggggctgccttgcacctccatgacattggcatcgtgactatggactggctggtgaggaatgtcacctacaggcctcactgccacatctgtttcaccccaagggggatcatgcagttcagatttgctcacccaactccccgtccatcagaaaaatgttccaagtggattctgctggaggattatcggaagcgggtgcagaacgtcactgagtttgatgacaggtgagtagtagttcagaaagcacatgtcccaggcctgtcatggggtggcagtgggtaggtgtctcccttggtacaaacctatagataaaaatctggctttaataaaacatgaggcaaggctgagtgcggtggttcacgcctataatcccagcactttgggaggccaaggcgagcggatcacttgagcccaggagttgccagtctggtcaacatggtgaaagcccatctctaccaaaaatacaaaaaattagccaggtgtggtgctgcacctgtagtcccaggtacttgggaggctgaggcaggaggatcactttaacccaggaggatcactttaacccaggaggttgaggccacagtgaactgagatggagccactgtactccagcctgagtgacaaaataaaaccctatctcaaaaaaaaagcatgagcacctttttcttttaaccttgcaggatactttgctccacaaaagcattcaacaccttttctatccatagtagtttttctggtgcatttaaaatctacaaaaagcattatcagcaacactatttttgtttgttattattattgttatttattattattattatttgagacagggtcttgctctgtcacccaggttggagtgtagtggcgtgatcttggctcacagcagcctgatcttggctcacagcagcctctgcctcccgggttcaagtgattttcctgcctcagctttctgagtagctgggattacagacatgtgccaccatgcctggctaatttttgtatttttagtagagacagggtttcaccatgttggccaggctggtcttgaactcctgacctcaggagatctgcccatcttggcctcccaaagtgctgagattacaggcatgagtgaccatgcctagtcagcaacactattgctgtagcaaatgagatttgtctgatgctcaataaaaccagagagaataaaagttcctagctctgaagtgatgacaatctagctggaagataaatcttcttgaaaatctgatgcagcaacttcctaacagacttgtatagtatcattattattattactatttaagacagggtctcattctatcatctaggctggagtgcagtggcacaatctcggctcacttcagactcaacctcccaggctgaagcaatcctcctgtgtcagcctcctgtgtcagctgaagcaatcctcctgtgtcagcacactagaggtgtgcaccatcatgcccagctaatttttgtattttttgtgagatggggttttgccgtgttgcccaggctggtcttgaactctgcggctcaagccgtcctctcaccttggcctcccaaagtgctaggactacaggcatgagccgagccattgtgcctggcattgtatagtaatattataagtgacaattaatttggtcacagaaatgtctacagagtgcccccctgaggttacttccctttatgaaatgagaaacgtgaagctgagcaaggttaattagcttatgcaaggacacacagctggtaaatggccagttggggatacaaacctgggtgctgattcgagttatttccattccactcccttcattaacctgctcgagctgccataacagaataccacaggctggggagcttaaacaataggaactgattttctcaagccgggcacactgggtcatgcctgtaatcctagcacttcgggaggctgaggtgggaggatcacttgcacccaggagttcaagaccagcctggtggccgggtgtggtggctcatgcttgtaatcctaacactttgggagaccgaggtgggcggatcacttgaggtcaggagttcaaaaccagccaggccaacatggtgaaaccctgtctctactaaaaatacaaaaaaattagccgtgcatgctggcagccacctgtaatcccagctactcgggaggccaaggcaggagaatcacttgaacctgggaggcggaggttgcagagagctgagatcatgctactgcactccagcctgggcgacagagcaagattctgtttaaaaaaaaaaagaaagaaagaaagaccagtctgggcaacatagtgagatccccatctcaacaaaaaataaaaaattaaccagatgtggtggtgtacacctatagtctcagctaccccagggggctgacataagaggattgcttgagcctgggagattgaggctgcagcgagctgtgattgtgacactgcactccagcctgggcaacagagtgagaccctgtttcaaaaaaaaaaaaaaaaaagaaggaattgattttctcatggttctggaggctggaagtctaagatcaaggtgccagggcaggggtggttcctcctgagacctctgtccttggcgtgcagaaggcgcctctggctgtgtactcacatggcctttcctctgtatgtgcactcctgcggtctcttcttcttcttctttttttttttttgagatgagtcttgctgtgtcgcccaggctggagtacagtggtgcgatctcagctcactacaacctccacttccagggttcaaacaattctcttgcctccctagtaactgggattacagggacaaaccaccacgcctggctgatttttgtattttagtagagatggggtttcactatgttggccaggctgatctcgaactcctgacctcaaatgatccacccatcttggcctcccaaagtgttgggattacaggcgtgagccaccacgcctggcctcctcttcttacaaggacacccatcttattagggtagagccccatccttacaacctcatttagtcttaatcatctctttaaaattcccttctccaaatgagggctagggcttcaatatttgaatttgggggtttggggacacaagttagtccataacattccccaaaaagagcttggtctagtttcctgtcagtgggtataggaagaaaaaaagagagagagagagagctttttggtctagaaagtacagtggggtcagactggccaagcatacagagggaggacaggagccaggagagactgactggtgagctctcatcttaagcagtctcctgcgtttggggtttgggtttaagcaggcagtgggctgcctggccacaggacccatgcttatatcgtgagcgtgggaatgctcccctttgccccttccttatctccactctagggtgaatcctgtgagctgctagctgggatatgcaaggtgggtagcagtcctatgggcgcccgggggcagtgtcctggatcatgcctctgccactccccacttcgtgtcttggacagcttgctgaggaatttcactctggtgacccagcacccggaggtgatttacacaaaccaaaatgttgtctggtcgaaatttgaaaccatcttcttcaccatctctggtctcatccattacgcaccagtgttcagagactatgtcttccggagcatgcaggagttctacgaggacaacgtgctctacatggagatcagagccaggctgctgccggtgagcccagctctcctctctgttcctcccacctcctttgctctggcctgactcagatcttagctggtagaagactgaatgctcatgaattgaccactcaggtctctggtgcaagggatcatgtgcctttccaggggccaacatgagcaaggaaacctgaaatggactgggcagcctccagcaaaactgggaacacattccgtgctgccctttgcccccctgtttctcatggttccccgttctcccctctgccatgatactcagggcctcgtgacataagctgagaaggagaattgggatagagccatcttaggggccaaaacaaggggtttgaaaaataaaaggagccacatggcagggtgagggcaagagacatgcagatgcataatcgtccatgggatttggaaattacaaggtcacctttgagcagtttcagtaacatgctgagaagagaaaccccatttctgggagtagaaaaatgaaatagacggccgggcatggtggctcacacctgtaatcccagcactttgggaggccgaggcaggcagatcacaaggtcaagagtttgagaccagcctggccaatatggtgaaacactgtctctactaaaaatacaaaaaattagccgggcatgagcctgtagtcccagctactcgggaggctgaggcaggagaacacttgaacctgggaagcagagattgcactgagccaagatcgcaccactgcactccagcctgggtgacagagttagatgttgtctcaaaaaacacacacacacaaaaaaaaaaagaaagaaaggaaaagagaaagaaaaatgaaatacaggtgatgaattggagccaggtttggctgattaaaggctctgagtgtgatttgagaaaaagaacatcgagatagctggagggaaccacaggggccacaggtttctttttaggatggagagacttgttttgcacacagaaggaagaagtgtggagaggttaaaaagagaggggaggccaggtgcattggctcatgcctataatcccagcactttgggaggctaaggctggtggatcacttgaggccaggagtttgaaaccagcctggtcaacatggcgaaattccatctctactaaaaatacaaaaattagctgttggccgggcgaggtggctcatgcctgtaatctcagcactcgggaggctgaggcaggcggatcacgaggtcgagatcgagaccatcctggccaacatggtgaaaccctgtctctactaaaaatacaaaaattagctgggcgcgatggcgcatgcctgtacttctagctacttgggaggctgaggcaggagaattgcttgaacctgggaggtggaggttgcagtgagcagagattgtgtcattgcactctagcctgagtgacagagtgagactgtctcaaaaaaaaaaaaaattagctggcatggtggtgcgcacctgtaatcagctactcgggaggctgaggcgggagaatcacttgaacccagggggaggagcttgcagtgagcagagataccgccattgctcttcagcctggatgacagagcgagactccgtctcaaaaaaaaaaaaaaaaaaaaaagaaaaaagaaaaaaaaatttgattttaaggaaggaagtttggagagagtgaaatggaaaggagtagaaagagtccaaaagaagggagcatcatcaaaaaaatctgatttttgggtcttgcattttggccagaagcaaaggataactgaggttaggtactctgagatggactgacaccaggctccgtgttggtaggggagggatctttcgaggagagcagccctaggtgctcaaatactgctagagttttatttcagtgagtttattggagagaactttcctgaggatgtttttgttgggctgagggagatggggtattgtgggagtgggcaggatccttgggtgttttatgtggtgagctcagacgggtttgagctggttaaaggttatcagtggcttggggaaagtgacctttggtagagtcttctccacattgtatccaagagagtctgctcgttcatttacatattgatcggatacacaaatgccttggggactgacagttaagcttgtggaaaggcccacatggtggcagtattttagttttgttagcatattctgtaggcttttatacgctccgaagtttactgtttgtagacccagaagtgataggactccgcaggatcaatacacactgaacaaattcataagggatagatgtgtaaacaagaaagtcagaatgctgttatcattcggaccagacacttatgcttcatcaggaaattctcctcttttcttttctttcttcttcttcttttttttttttgacagaatttctgtcgcccaggctggagtgtagtggtatgatcttgcctcactgcaacctccacctcccaggttcaagcgattctcgtgcctcagcctcccgagtagctgggactacagatgcacaccaccatgcctggctaattttttgtattttcagtaaatggggtttcaccatgttggccaggttagtcttgaactcctgacctcagctgatccactcgttattcaagttattccagtttgtgggtctcaactctccctttgcttggcatcctggactgacccacctttttccttagatatgttttttttttttttgaggcagagtttcgctcttgttgcccaggctggagtgcaatggcaccatcttggtttactgcaacctccgcctcctgggttcaagggaacctcctgcctcagcctctggaatagctgggattacaggcgtgcaccaccacacccagctaatttttgtattattagtagagacagggttttaccatgttggctaggctggtcttgcactcctgacctcaggtgatccacccacctcggcctcccaaagattacgagccaccatgcccggccttttccttagatatgttaatacccttggtgagtttagcggcaaggctggatcctggagagtccgatctcttgtgtgatctgcatgtctccacttggatctgttgcttgttttctattttaactctctgagtgcagagttatatttccatttctgagttcttgagaagtgggaggggaacattaactttgccttgcagtggagctttcatcagttttgtggacagagcagacagacaagacacaggacacaaatcatccttttaaaagaaaagagagggtctcatcttttattgagaaaagaatttctgaaaagggaggcgctggcaaaaattgatgagctgactttgctcctggcctaggtaggctggaagaaactgcacttcccagagcaggtgattcttgtgtttgtttgtttgttgtttttgagacattctgtgttgcccaggctggagtaaagtggcgtgatcttggcgcattgtaacctccgcctcccggattcaagtgattctcctgcctcagcctcccgagtagctgggattacaggtgtacaccaccgcactcagctaatttttgtatttttagaagagatgagatttcaccatattggccaggctggtttcgaactcacgacctcaagtgatccacccaccttggcatcccaaagtgctgggattacaggcgtgagccaccgcgcctggcgagatggggttttaccatattgcccaggctggtctggaactcctgagctcaggcaaatacacccacgtcggcctcccaaagtactaggattacagacgcgagccatgcccagctattaattcatcttattgatgtcgaaactaaagcctggaaaggtcaaagagcttgatgaaggtcaaataggtagtaaggggtggctggacccagaccagggctcctaagttcgtcgctttcctcaccgcgctgggctctctgagcgtcctaatagccacgcccacctcaaatggcgatcccagagagcatctggcttcaattttcctttttccggaggggagatggattccctggaatggaactgggctctggtaggggagaacttcctgttgggcaaatcctgacaactgtcttggtgtgggagtgcatagggaactccgaccctcgcagaaccctgggatcttcgtgggtggaggggaagaggatagaggaggggagggaggagacgctgagacagaggctttcatcttgagcctggtggggaggcatgtgggagaagttgctgagcggttggatcggagggaggaagagaagggccagagcactggcttcctgttccatcttcccccttgttctgcaggtggccattttctccttccagagccggaggtggagagacttgggggcctgcccagctccagtcctctgtcctcactctgcccgtctccgcccgtcccccagccaacctttggagaaggtgctgggctgctaggatttgggattctggtggagggggagggggaggggatgtgcccatttgttcgggtctgaccctggaacaaaggcttttgccacggagagtctaggtcttaatgccccccattagccagagttggggggccaccaacacattaacaactaaaaacagtcttcactagaatccttttgctgagccccctcgcctccccctgcctggtcgcaggctaattccggcctgggctgctgtggacggactatcctggccgctgagcctcccattgtgttcctaatgctcagtaacaaaggctgctcgccggtagcaacggtcgctaggcgggtcttatctcctgggctccggccccttcccccacggcagagtctgaggcccagactgggtcccctgagtctttagcatggggctcttccaagaccccggagggttatccacaggggatggccctgctggcacttatggaggggagagcttatgggagacacgtcggtggcagagaacctgtgacagtcgttcccagacgttttctaagacgttgtcgttcatacagtaagcatttctagtgctccctgtacccgcgctccccagcccccatgcttttgcctggattcttagcagacctttcattcaaaattccatttggctccttgctgaatgaagcgaaccctgtgtcatgttgctggtgtcgctttacgagaacacgcaccctcttaactgctccctttttgacaggactcatccgactatgctgtcattgtgctatttacttgtctgtcgattggaacagtggcagatcttcagcccagctgtatatcgcaccctagcaccacctgggagattacaaacaccaagcttctaccccacagattctgatttggttgctctggggtgggacacaggcatttttcctctccttgagtgatgccaatgtgccgccagggctgagatgtcactctagtgactgtcacctttctacaggagggggcaggggcctcctgatgacaggagacaactcagggcaagcaaaattctgaaatgtggtcggcctccagccccactaattatgcaggggtactgagtttctcaatttttttgttttttttttttttgagacggagtttcgttcttgttgcccagactggagtgcaatggtgcaatcttggctcaccgcaacctccgcctcccgggttcaagcgattctcctgcctcagcctcccgagtagctgggaatacaggcatgtgccaccacacccggctaattttctatttttagtagagacggggtttctccatgttggtcaggctggtctcgaattcgtgacctcaggtgatccgcccgccttggcctcccaaagtgctaggattataggcgtgagccaccgtgctcagccttctcaaacttttaaagcctcaaaatccttatctgtaaaatgagacctacctcatagtgtagttttgagggttaaatgagattatggcataaagccccctgcatatgcctggcatgtagtagaagctcaacacttcttaagtgaatgatactctggtagtgaaagctgagtgaaactgccagtactggccaggtgcagtggctcatgcctgtagtcccagcactttgggagatggtggcaggtgaatcccttgagctcaggagttcgagaccagcctaggcaacatggcaaaacccttgtctctacaaaacaggacaaaacaaaataattagccaggtatggtggtatgcacctgtggtcccagttactcaagaggctgaggtgggaggatcacctgagcctggaaattcaaggctgttcaagatcatgccactgcactgcagcctgggccgcagagtgagaccctgtctcagacaaaaaaaaaaaagaaaaaaaagaaagaaagaaaaaaagaaattgcgagtccttgtttctgttctgatacaaaccagttgtatgacctttacagcactctgctcccaaatttccccatgaaccaatctgtcgtccaggctggagtgcagtggtgcgatcttggctcactgcaacctctgcctcctgggttcaagtgattctcctgcctcagcctcccgagtagttgggattacaggtgcccatcaccatgcccggctaatttttgtatttttagtagagacggggtttcgccatgttggccaggctgctcttgaactcctgacctcaggtgattcgcctgcctcggcctcctaaagtgctgggattacaggcataagccaccatgccaggcctcagagatcttcttttaagcagagttgtcatttgttaatattttttaaaggttatttctttggtctcccttctattctgctggcatgactccacctaccactccgccaacaactgtctatttgcccttgctgcctgggccttagtacttttaaaactcctgtggacagcactctccttgaattaatatttatttatggagctcctgctctggtgccataggagaggaggtggggagagtaaaactgcaaggactctaccctggaggagcctccaatctagctggggggtgtgggcaggagactcagtaatgacagggtggtcaaggtcaggacagaaccctattcttccctgctgtgaaccagctggatgagtccaagacaactgcaggtaacaattgtgggttgggttaacacagtggttctccaactttctggtcccagaacctctttatattcttaaaaatttttgttaatttcaaacgccttttatttatgtggattatatctattgatatatcctgtattagatgttaaaattaagaaattttcctttttttttttttttttgggatggagtttcacttttgttgcctaggctggagtacaatggcacacaatcttggctcactgcaacctccgcttcctgggttcaagtgattctcctgcatcagcctcccgagtagctgggattacagcaaatttttgtatttttagtagagaaggggtttcaccatgttggccaggctggtcaactgacatcaggtgatccactcgccttggccccccaaagtgctgggattacaggtgtgagctattgcacccagccaaaattaagaaattttcttgccgggcgcagtggctcatgcctgtaatcccagcgctttgggaggctgaggcgagcagatcatgaggtcaggagttcaagaccagcctgaccagcatggcgaaaccccgtctctaccagaaatacaaaaaaatagccaggcgtggtggcatgtgcctgtaatcccagctactcgggagtcgtgcttgaacccaggaggtggaggttaaagtgagccgagatcgcaccactgcactccagcctgggtgacagagcgagactccgtctcaaaaaaaaaaaaaaaaaggaaagaaattattctaaatacaaacacataatccatgattggcattatcggtcagaatgatatgacacatgatgcagcttcaggaaaattctactgtacatccatgagagaataagagtgaaacagacagtgaaccaagattgcaccaccacactccagcctggacgacacggcaagactgttgcaaaataaaagtttaaaaaaatttttttgttttgttttgtttttttttgagacggagtcttgctctgtcgcccaggctggagtgcagtggcgcgatctcagctcactgcaacctccaactcccgggttcaagcgattctcctgcctcagcctccccagtagctgggattacaggcgcccaccaccacgcccggctaattgttgtatttttagtagagatgaggtttcaccatgttggccaggatagtctccaactcctgacctcaggtgatttgcccgaggtgatctgcctccgcctcccaaagtgctgggattacaggcatgagccatcacacccggcctaagaatttgctatgtgcacagatagatgcaggccttccttgaaaagacgtgaagcaccaaagaagttagagtgagggcttatattccattttaacaactggtaataaattgtgaagaagtgacaagatgaaggaaaaggggtttgggcttctagggacagtaaattgtgggcaggcaaacatatgggggaaactaatggaagataagggcaattttataaggctggtttgtgcagacccatcttggtaacaactttctgtttccggtggtaagggtgattctcctggtacgggagaggggagggcgacaccttcacaaagggaaatttaggcagatgaggtgggcaaagagctctttcttcatttgctgcttcttaattgccttcagctaaaaatatttcttctgctaaagtggcctattgggtgacatattctgaccctcttcagtaaataataataataatagacaatactagatcctgaatgaacagtacctaaggttcttccttctggcacgctctggcagccttaaagttcagtagcccctgagcatggctgtgccaggtcaggcagtcagggaaactgcccgagcagagtgagtggcctggccaggtgcaggttgtggggggctgtgtgacgtgccaggcttcatgggggcagcagaggaaacagaagagcaaagaccagtggagagcctcactgcctgctcccccactgcgcctgcccaggcagcggggcagcaccctggagatgagagagcagcagtactgttctgcaggcctgggggaatgcggggatctgagggactgcccagagacaaaggacacacaatggccgcagcctggaggggtgtgggaggcccctaggctggggagacaggagtgaggcaaggggctggtgggaaatgagcagaggaggtggactcccaagggcccatttcctgagatgccacagaggcaagagccgactcccgggaggaggaagggcatttctcccttagtgaggggacagctcctggctcccactgcagctctcaacctcggctccttgaacccccgcccccaggcagctcttgactctgtgtggagccaccattcccttggtcaggactagcaaccttctctgacccatccagtcacaacaaactgcttcttcttttgagaggtcatgtgcttctctttagcacttattctattgtttcttttttttttttttttcattcctttttacagacaggaactcactcattgcccaggctggtcttgacctcctgggctcaagtgatcctcctgcctcggcctcccaaagtgctgggattacaggcgtgagctctttttagtgggtcaggtctatctctctgaccctattgtcactcctgagggcagctatcttgtctattagcattttttcatcccttccaatgcccagccctgttccttttatatcataagggcttaactgatgccatggaagtaatcgacatctccatattattgctccctgtctccttcaccccacagtctctgcagaaattcccacatcttttttttttttttttagtttttttttaaggtggagtctcgctctgtcacccaggctggagtgcaatggcgcgatcttggctcacagcaacctctgcctcctgggttcaagcgattatcctgcctcagcctcccgagtggctgggactactacaggcacgcaccaccacacccggctaatttttgtatttttagtagagacgaggtttcaccatattggccaggctggtctcgaactcatgacctcgtgatccacccacctcgaccgcccaaagtgctgggattacaggcgtgagccaccgcgctgtcctttttttttttttttttttttttttttgcagtttttacggttttatttaaacacaaaaaggggacatgagctgtctactcattttctttgctgcgcagcctggcattggggttggtgactctgatgaccagctgggcagctctttccacgatggcttcgtggttcttagaggaaacgttgtgagcgatgtcagcacagggagattgttgcacatcagcagcacttccagctccttgatgttgtggaccaggaacttctggaagccactgggcagcgtgttctttgtttttttttgttgctcccataaccactgttgggcatcgagatctggcccttgaaccttctatgaaccccgttgtgaatacctctgggtttccgccagttacggttaattttgacgtattggtcagaccggtgccagatgaactttttggttctctttttgacaatcaggcttcacaaggggtctgagggtggccatgatgccaaagaggagatggctgccacttctgtaggcagcgccgaggaagagagagggccccccctttttttttttcgagacagagtcttgctttgtcgcccaggctggagtgcagtggtatgatcttggctcactgcaacctctgcctcccgggttcaagcgattctcctgcctcagcctccccagtagctgagattaacaggcatgtgccaccatgcccagctaatcttgtatttttggtagagatgggggtttcaccatgttggccaggctggtcttgaactcctgacctcaagtgatccccctgcctcggcctcccaaagtgctatgattacaggtgtgagccacctttccccattacacacctcccttcccttagcttccttgtcacctgcccactcccaactctccccactctgctctcactgtgtcccccttgctgtccctggtggcagtggccgccttgcagctgctgcacctggagttagggaagcagtggggaggtgagcaggtagtggggaatgacgtcattctcagatcactctttctagctttcatcctctccccccgtgacctgctcttcaaccattatgcagatgcttaatgggcacctaccctcgcgtgtgccatgtgctgttttaagtgcagtgacccagcaatgaaggagacaggtgggcatcagcatcagggttatcccagagccagctaggaattccccatgcagcagcagagacaatgcccaaggccgtagaggacctgaacaagggaagcacaagtccagcctggctggacttttgggaacaaggccacttggcctaatccaaacacaaataaaactgttttgtgggtcccctgaccccatctacttttcccagagctcgttgatggctgggaaggagttgactgggaaggaggtggctgggcaagggtggctgggcaggggtggctgggcaagggtggctgggaaggggtggctgggaagggggtggttgggcaggggtggctggccaggggtggctgggcaggggtggctgggaagggggtggcgtctctcactgctcacctgacggctcctggttgtgctttcttcccaggtgtatgagctcagtggagagcaccatgacgaagagtggtcagtgaagacttaccaggaagtagctcagaagtttgtggaaactcaccctgagtttattggaatcaaaatcatttattcggatcacaggtgagagagaatattgctgaaaagctcgggttgggaggctgggatgcaggcagagctactaggctgggaggggaggggtgagaagcggggctgggaggccgggagaggcccagcactggtgccaaggagctgtgctgtgcctgtgtgagagcacagtcctaggtaagtgcggtgacccaacaatgaattgctgcctgaagccacttctagttcaggtcttcacccccaaactgaaatgaagaatgtgtgaatttcccagataattctcggctgtgaccccacattggcctggtgactcatttatgagcataatggttttgcctgaatgtttggataattggcccgtttttggtttcaatttgcctctgggttctgtgtgtggttgtgtgtgagtccttgatcacggagacaccctgagtggcactggctcaagtctgcgtgtggggacctccagtagtaccatgtgcgtggcctggcacgtgggtgaaagacccactctttttcccagggaagcacagaaagctttgcagcttaattgtccttctgactttaccagacaagacccctcccctcactttaaagagcagccagtctaaggctgggacctgtccatggtcgcagctgcaagggcagcagccagtggggtccctcggagtcaggcacggggcgggcaccgaagggatccggcagcggctccctctgctcagctcacccacgagcctgggctctggagggcactgactccccaggagcctcctcccatgcccagtcttcctgagtccccttcccttccatggggcctggggcctggaggagctaagctctggctttgtgccggtccccctaggagggagcttgcaggatgggcccacgttctgctcagaggctccctggtgccaggtgccccttcccagggccagtggcaggagggtgtgagggctgagctgagtgcatcagtgcccccaggtttgcctaggctctggggagaggccatgggtggggcaggccaggaaggctttatccccacagagccgaggattggagcaggagagccagtggcagggcaaagaccttgagcctgtcgtgggcttgcgccagaccctgtgttttggggcttttgttgtcatgctgcctgccttgcccctgtagggttctgcagtacccaggatcttgctgacttaatcagcaagaggccatatggttactgggtccagccgacccatcagggacttgggtgacctgtggccctttgcaggtgtgcagtggacagagagctgcccctgagctgcatccatgtctacacccccgacagagatgcagggagagctgggaacaaggccacctggcctcctctaaacgcagacaaataaaactgttcccgtgggtcctctgaccccatctacttttcagagactacaggtgcccccagagccagcaagggtctttgataagaatggatttgggctacatatctctcagggatcacaatggcctggtcagggtggggtcaggagggcaggggtgcctcaggtttgggaaacgggacctgcacacttggggctggcccagccctgcacggagggtgtgctctggggtttgtgctctgtcggtgctgggcactgtctcctggcttctctgtctgtctcacagatccaaagatgtggctgtcatcgcagaatccatccgaatggccatggggctccgaatcaagttccccacggtggtggcagggtttgacctggtaacccatgctgtgaacagaagggctgcctgttaagggggcatgcgaggatgcctgtctgggtggagcggcaactccctgggaagggagcgcaatgtgcctgttggtaccctgacatcccagggcaggctcaggctgctgacacagcagggctgctcagagctcagcgctgaccctcttcagaggcctacaggggacggctgtcactggagaagggagagcagacagccagttctaacaagctaacaaggaaagttccagaataaggatggcattcagggagtttggaccacagttatgggctcattccccatggccctgcctgtgcccttttttctatcccacactgctcacctaggtgtgggtcttaaaaccctcaccagcccctgtagcacgcggggtggggactggggggtaatgtctggaaacagagtccaggatggagccaggcctttgcaaatcctcaaggtagtgatatttgtccctccctctccagccatcatgcctggccacaccagtttttgaagctacacattcataggtgttgtcattgtcccacacctccccaccaaatcgaagcacaaccaggacatttcttaggtgacagctcggcaatctcataaagaatctaggccgggtgcagtggctcatgccctcagcactttgggagggcgagacaggtggatcacctgaggtctgaagttcaagaccagcctggccaacatggagaaaccgcatctctactaaaaacacaaaaattagccagccttggtggcctgcacctgtaatcccagctacttgggaggctgaggcagaatcacttgaactcaggaggcagaggttgcagtgagctgagattgcaccattgcactccagcctgggcgacagagcaagactccatctcaaaaaaaaaaaaaaaaaagaatctagattagtccagggcagtggctcactcctgtaatcccagcaccttggggggccaaggtgggagggtcacctgagtccaggagttctagaccagcctgagcaaatcggtgagaccccgtctttacaaaatatatatatatatatattttttgctcttggccaggctgtagtgcattggtgtgatctcagctcactgcaagttctgcctcctgggttcatgccattctcctgcctcagcctcccaagtagctgggactacaggcacccgctaccacacctggataattttttgtatttttagtagagatggggtttcactgtgttagccaggatggtctcgatctcctgacttcgtgatctgcctgcctcggcctcccaaagtgctgggattacaggtgtgagccaccacgcctggcctgctcctggtcattcttaaaaggctgtgtgacaaaggtcccggcagtggtggcagggtacaaggaagggtgtgcacaggctccagggcgcgccatcagcaagtgaggcatgcgccctgcagacacctccctgtccctctctgtcctgcaggtggggcatgaggacactggccactccttgcatgactacaaggaagctctgatgatccccgccaaggatggcgttaagctgccttacttcttccacgccggagaaacaggtgagcctgcgggatgcgagcagaggcagcggaggtggtcaatgggagagctcctggccacaggcccatgcctcagggttagagcctacaggcgtttccagagccctttcctgtgctctatctcacttaatcctgacaacagccccatggagaaggaataacaaggataatagaatcagccactttacatgtattatttctagtttctctttcttctttccttcctgttttcttttcttcttcttctttttttttcttttttttacggagtctccctctgtcgcccagctcactgcaacctcggcttcccaggttcaagagagtctcctgcctcagccttccaagtagctggtactacaggcacctgccaccacgcctggctaattttttgtatttttagtagagacggggtttcaccgtgttagccaggatggtcttgatctcctgacctcatgatctgccctcctcggcctcccaaagtgctggaattacaagggtgagccactgcgcctggccttttctaattgatttctgattgtttccccagtttttaatctccatttgatagatgaagagcccaaggctccaaacacagtggtccagggttaaagagctggtgcgcagtggagtctgaatttgaatccttcttcttcttctttttttttttttttttaatttttcgtggtaggggcataatcctgcaaactcacatcatcctactttggctataaaaattcgttttaggctgggcacaggcacagtggctcatgcctgtaatcctagcactttggaggctgatgtgggtggatctctttaaacccaggagtttgaggccagccagggcaacatggcaaaactttgtctctacaaaaaaatacaaaaattagccaggcatgatggtacacacctgtggtcccacctacttagaggctgaggtgggaggattgcctgagcccaggctcactgaactccagcctgggtgacagagctagaccctgtctcaaaaaaaaaagtgttttagccaggtacagtggctcacatctgtaattctagcacttagggaggcagaggcaggaggatcacttgagcccaggagtttgagaccagtctgggcaacatagtaagattccattctacacaaaaaggaaaacaaattttttttttttttttttgagatggagtctcgctctgtggcccaggctggagtgcagtggtatgatctcggctcacttgcaagctcggcttcctgggttcatgccattctcctgcctcagcctcccaagtagctgggactacaggtgcccgccaccacgcccggctaattttttgtatttttagtagagacgaggtttcactgtgttagccaggatggtctcgatcgcctgaccttgtgatccacccgtctaggcctcccaaagtgctgggattacaggtgtgagccactgcacctggtcaatttttttgttttttgagatggagtctcactctgtcacccaggctggagtgcagtggtgcgatcttggctcactgcaacctctgcctcccgggttcaagtgattcttctgcctcagcctctggagaagctgggattacgggcatgcaccaccatgcctagctaatttttgtatttttagtagagatggggtttcaccatgttggttaggctggtcttgaactcctgacctcaagtgatccacccacctcagcctcccaaaatgctgggattacaggcttgagccacggaaaaaaattcttttgagacagagtcttactgtatcgcccaggctggagtgcagtggtgcgatctcggctcactgcaacctctggctgccaggttcaagtgattctcgtgcctcagcctcccgagtagctgggattacaggcgcccaccaacacacccggctaatttttgtatttttaatagggatagggtttcaccatgttggcccaggctggtcttgaactcccaacctcaaacaatccacccgccttggcctcccaaagtgctgggattacccggcctcatgtgatattttgatgcctgtatataatgtgtatgaattggaacactttctgacgctctccatcctccgagtgaattgtgcttgagaggttaactgatctgcctaaagccacacagctggaaattggcagaagagggaggagaaccaggtctgctccttgtctttaggatgttctgtcccgcattatcgtaggagaggaaaccctgccctgccccatgcaggccctggctgctgttcctcctgaaacgccatcagcccagccacatctttctttcccagaactccatccttgggctcgctcagtcatctcagcccctcccgtattccagtccttaaaatgtgtaaaccctaactaagaaagatcacggctgcaatttcagatccaaaggaagatttgggaggaggctgttcacatggaggccgggaccaggagggcagctctcttcagcatcccacctgtcaccctcggaagaccaaagaggggtggagagagtggtgggcaatttcatttcccacccaggcttaagctctgctctatcacaccttctctcagagaaagggaccttgtgcattaatctctttttcctgacatttcgagtcaatttagatccaatttagatcaaagtctgctctaggagagcagaagaattgtttgagggggagggggttgggcgagggtgttgttaaccttgaagagcttgtggtctggttggggaaaatcatacttatgtgtgtgaaataattctggccctacaaaacattgcagctcaggacctaacaggttccaagatgtatggtccttggagatgattttgccaggacttgggtatctaatacctaaaagtaatgtccttatttttatttttttattttattttattttattttattttattttttgagacggagtctcgctctgtccccaggctggagtgcagtggcacgatctcaactcactgcaagctccgcctcccaggttcacgccattctcctgcctcagcctcccgagtagctgggactactcgggcgcctgccaccacgcccggctaatattttttgtatttttagtagagacggggtttcaccatgttggtcatgctggtccggaactcctaacctcgtgatccgcccacctcggcctcccaaagtggtgggattacaggtgtgagccaccacacccggccaatatccttatttttaaaaagaaaaagaaatctttaaaaaccagtgaaaatccaccaaaacacatgtgctacatagcaatggaaattcttgagttttatttctatcaggaaagtggagttttcatatatatatatatatatatatattttgacatgggcactctgtcacccaggctagagtgcggtggtgtgatgacagctcactacagcctccacctctgtcacccaggctagagtgtggtggcgtgatcacagctcactacagcctccacctcctgggttcaggttatccttccacctcagcctcctaagtagctgggactgcagccacatgccaccatgcctggctaatttttgtattttttgtagagacagggtgtctctatgttgcccatggctggccttgaactcctgggctcaagcaatcctcctgcctcagcctcccaaagtgctgcgattacaggtgtgagccaccgcacccagccagatgttcatattttatatgtgaatccattagaatgcttatggctgcaagaatagagtacatgcatcccaccgattttacaataaggacatttgttatctcacgtaagaagcaatctgtgctatgcccattgtgtgggtgattctgccccacttggttgtcggatggtgaatcacatttggggtgaccacatccagtgaagcaaaataggagacagcctcccagtggatccccttttatcagggaggaatcccccaaagctccccaacaaataacctcccagtccagcgttaaggctattttagctgtaagggagactgagaaaggcacatctgacctttcatcctctaccgagggccctagctgcaagaaaggtgtgatggggccgggcgtggtggctcacgcctgtaatcccagcactttgggaggctgaggcaggtggatcacaaggtcaggtgatcgagaccatcctggctaacacagtgaaaccctgtctctactaaaaatacaaaaaaaaaaatcagctgggtgtggtggcgggcgcctgtagtcccagctacttgggaggctgaggcaggagaatggcatgaaccccgggaagtggagcttgcagtgagccgagactgcaccactgcactccagcctgggtgacagagcgagactccatctcaaaaaaaaaaaaaaaaaaaaagaaaggtgtgatggggatggcaggggagaagggaggccacaagactgtctgcggtcatctagcgagtgataacatcttgacagtactattaaatatataaattaaagtgagcacatacaggtagttatactgatgttgtcaataagagaacctgtaacatattgttgtaaagatcataagcataagagtcccagagcccggtgcggtggctcatgcctataatcacagcactttgggaggcctaggcgggtggatcccctgaggtcaggagtttgagaccggcctggccgacatggtgaaaccccgtctctactaaaaatacaaaaaatagccgggcatggtggtgggcacctgtaatcccagctactcaggaggctgaggcaggagaatccgcttgaacccgggaggcggaggttgcagtgagccaagattacgccactgcattccagcctgggcgacagagcaagactccgtctcaaaaaaaaaaaaaaaaaaaaaagagtgccacaaaagaggaagaaggaaagcggactgtggggtcagagagacgaaggtttaaaactcagttttgcaggccaggtgcggcggctcacgcctgtaatcccagcactttgggaggctgaggcaggtggatcacgaggtcaagaaatcaagaccatcctggccaacatggtgaaaccctgtctctactaaaaatacaaaaaattatctgggcgtggtggcgtgtgcccgtagtcccagctactcaggaggctgaggcaggaaaattgtttgaacctgggaggtggaggttgcagtgagctgagatcgtgccactgtactccagcctggcgacagagcaagactgtgtctcaaaaaacaacaacaacaacaacaaaaaactcggttttgctacttactgtgtgaacatccttggtcaatttatagaagctattaagtttcaactttctcattagaatgataaattaataaattagatgattaatttaataaagccatatcatacctctctttagcattgttaaaaggaaactgtgtgtgtgtatttgtgttaatgttaatttctcttcatttttgtgcttggggggctgtttatttgaggatggtcggggggcgggtgggtcagacccatccatcccccatggaagaccagacccatccatcccccatggaagaccattcccgtgtgttcagactggcagggtacttccatagacaggaacattctggatgctctgatgctgaacactaccagaatcggccatggatttgctttgagcaaacaccccgcagtcaggacttactcctggaaaaaggacatccccatagaagtctgtcccatctctaaccaggtatgtgtgacccatgtggctaatcccatatgatctcccctaaccacaacctctgctctcttaaactttttgctgtataacttatctctccttaactctcttgttacctacatccctccactctcctacccctgttagtaaagttattcaggaggggccttttgcctaagccaccaataagaatgaggcagcagtgagggtccccagtggggtggaattttgggcaagactgtagacaaagcaaaaaggacatggggggaggccagtgaagtgggacggaccatgggatgctgctccccatggtttcttggggtcctttgtgtctgtgttcagttagcgcttctctgagcaggaacagaagtgacccgatgtttgcagtgctgatgaaacatgaggaggagcataaggactggctctgttccttatgtctccttgtgactctgcccagaagtcatccccatactggggagatagtgatgggaagatgaagggagctgatggggctcaaggtctcacctcacttgtgactactctttttagggatcagagttcatctttctcccttccctcctattgcgcaggtgctgaaactggtgtctgacttgaggaaccaccctgtagccactctgatggccactgggcaccccatggtgatcagctctgatgacccagctatgtttggtgccaaaggcttgtcctatgatttctatgaggtcttcatgggcattggggggatgaaggctgacctgaggaccctcaaacagctggccatgaactctatcaagtgagtgtcctgtgtcctcccaggtcccccgcctccttccagcccgcagcttgtgtttgcctctctggaggcttgaggcagatgcctcgatggttcctgtgggttccttctcatcatggctgtttagtccttgctgctggcctggggagagtgctctgcaaggctctaatgtcctctcaggctccctgccccgttccccaacccctgccctgaggctgacctgggctcctcctcttcctgcaggtacagtaccctgttggagagtgagaaaaatactttcatggaaatctggaagaagagatgggataagttcatagcagatgtggctacaaagtgaggagaagctagccagccctctacaagctgtcttcttgcacacgctgtcacttcctctcactcgttcttgaatcagctccatgtgcccatgaaatcaatggcctctgtatggagcgaccctgtgagaagcacttggctggctgagcaaattcatcctctggaaatattctctctcagccacagtgacattgaccctcttggttttctcctgtctctggccatttcttccagtttccctatttcagagtcttctcctctctctgatctctgtgctgtttcctcaggactcagtcctgggctctcttctattctggtctctttatttttttatttttgtattttttcgagatggagttttgctcttgttgcccaggctggagtacaatggtgcgatctcagctcagtgcaacctccgccacccgggttcaggcaattctcttgcatcagcctcgcgagtagttggaattataggcatgtgccaccacacccagctgatttttgcatttttagtagagacaggttttcaccatgttggcgaggctggtatccaactcttgacctcaggtgatccactcgccccttggctcccaaagtgctggaattacaggcattagccaccatgcctggcctattctggtctctttaactctctcctctttatttctcttctctctctgtacacttttcctgggtggtctcatccattcctttgctttttcataccatttatttgttaatgattcccacatttatttatgcacttggagagctcacaggaatctcagaaactgatgaggtacaattctgaaccctcagtctcttccctttaaacctttctttttctctactttaatttttctaaagagtgtcttgctatgttgcccaggctggtctccaactcaagtgatcctcctgccgcagtctcccgaagtgctgggattactgacatgagccaccacactcagccctttaaacctttccctggcctttcccatagctggtgaaggacacctccatccattccacgcagttgctcaaagcagaaattttcagtgcaagtcttgatgctgcgccgtcccccactccctacatcagaacgcatccctcatctggactccagcggtggcttcttgatgctgcgcggtcccccactccctacatcagaatgcatcccgcatccagactccagcggtggtgctctacctgcacgctgttgccaagtccaagctaccatactcctgcctgagctatgacaacagcctcctcactgatctcccctttcttccctttgcctcctccagctcatttttcacagtgtagaatgacattttgtttgtttgttttgttttgtttgagatggagtctcgctctgttgcccagggtggagtgcagcggtgcgatctcggctcactgcaacctccacctcccgggttcaagcggattctcgtgcctcagcctcctgagtagctgggattacaggcatgcaccaccatgcccggataatttttgtatttttagtagagatggggtttcactatgttggccaggctggtctcgaacacctgacctcgtggtccacccgcctcggcctcccaaagcactgggattacaggcgtgagccacccggcctggcctagaatgacttttaaaagatcaaattaaatcaggtcactcctttgcttacaacgcagtgcgtttagaggtacaccccatgtctccacagggcatacagcatccgatttaatctggatccattccggcgccttcctctcccagtcacccagagggccccaaccccggcggccctttcttcctcaaatgtcctcggctctataccgtgcctgggtcttttctctttctctctgcctggaagattccttctttccccttttgtcttgcccactcctgtttacccttcaagtttcaagttcatgtcactgtctcagagaggttttcctgtgctcgccctgtttctctcaggaagccttgctcttttccatcatgcctctaatcacagcttataatcggatatttatttctgtgtctacagtcttgccctgccagactgtatgccccatgtgggcaggcgctcatgattgtttctgattgtttcacgcatgctgctaacccagagcctgggcccaaagctagttagtactcaataaacaatgcattgaatgag

SEQ ID NO: 727 - DNA, 335 bp, Homo sapiens
tcctattgaactaaatgtccatggagcatttatctgatcattttgaaataatttcaaaaagttgcaagaatagtacaaaaaactcttaccaggccaggcacagggggtcacgcctgtcatcccagcactttgagaggccgaggcgagtggattgcttgagcccaggagtttgagaccagcttgggcaacatggccagacctcatctctactaaaaatacaaaaattagctgggcatggtggggtgtgcctgtggtcctagctattcagaaggctgaggtgggaggattgcttgagcccaggaagaggaggttgtagtgaactgagatcacaccac

SEQ ID NO: 728 - DNA, 3283 bp, Homo sapiens
gtagcttccaacttaaagtatacctgccacaagaacgaaagtaataatctcacctccctttttgtgtagagactgaattctaattagttgtgttaatagtatttgctgaatacctttcaattcctaaaactggggtcaaagtagtcaacattgcagttaattatttttgaagaggatatgaactattctgttatttaagatattttaacctaaataccattatgagttaaaatgcataccatgatataacaatttacctattaactgttgacaatcttgcagccaattaagttttttatagaaccagtgttcttaggtatgtttgttgagccttctactttttttccctttgatgtggggaatagcatcaagcagcaagaaaagagtgttgatcgatttctctctctttctctctctctctctgtatccttgccgtttaaaatatgcactttccaactagtatttggccgttagggagttagtatctttgtaaagattaagtcagcagaggaaggtgggcaaataatatttttgataaagacttttggttgtgacagttgtagcaagttattgcttgaggagtgaatctggaagtttatttgaattttaactaaaactcacagattttatcattagtttactctcccttacccccaaataaaacaactgacagttatgagagacctcctgagaccacctggtatttccaaactcctatcatttctcccataaaatttgatacactaagtttgtttctggtataaaaattgagtgactgctctgtgtcagccattaaattttttcttgctatgagccatcttttttttttttttttttttaagatcctttagtttttagctgcttcttggtaaccttagaactttgcttccttgaagaacttggctttcttgatatggtgtcacttgaacaaagaaacttaaaaaaaaattcctctaagagtattttgtgtacaggtgaaagtaactttgtggcttggttacactgggtgtgtcacagctgagtaactccctcctgcacttcagcttgactaagcgttgagttcacatgtatacctttgcaaagctgccattcacaacttgttttggaactttagggttatcagtataaagcctgagtaacaaaacttagtcatccaatgtccaggctggattgtatttttattttgtgatcagtaattcagcacaatgctggaacacattactcacatttgtcttatgacccttttctgtaatcaatggaatctttaattgataaagcaagtctagggggagagacattttttaaaaaaagctcctatatactgaatatatttgagccctgattatgaagtgagggacaaggcttttctttttgaaataaatgatggaggacatagatatgtggtagccattcatgctacataatttagcattttattgttaatatgtttggttatgggtcttcttgtttggtatttcaacatgttctggactggatatcatactgaaaagtatttcagttctcattactgagtccctgtagtttggggaaaatgtgatcactgatcttgaaggagagaatgtttcagaagcatccggctaaggcaggattgtagagatagtcttgattttatactttggatttaattctgatgagtcattttgtcacttgtgtatgcttaactgttacctctgtgcctggcaagagctaggtatgagttcagcttttactttagtcctgaaaatttttgttcccagtttaggccagtgaagaagcacttatgattggacttgtaattttctcattttaaaaatgtagataatggtcatcttcattgggtcatgaagattaaataatatagtgcccataaaatgcttagcaaagagcccatcacattaaaagtgctcaataaatgtaagcttttagtaaggttattttattcttactgtttgtttcatcttactttcttgcacccctccttcatatcctaagttcttcttcaggagctaggttggccctgaggaactcgctggttgtcttggcctaccaggagagtttgtttaggccagttacaggagagatttgtgagaatgattttaggaggcaagtcctcatttagtcagcttgggtgcgttttacagttcatcctctcttagaattttttttttttttttttttttttgagaagagccagccttttgagagagcatatgactcttcctggactacaacagcttcttgtgtgaatcacagcccggcttttgccagttagtctgagtagataactacccacccccactcccccaagctgataattattaccctggtttatcctctgtctcatttcccctctcaagctgttagagaatgaatactgaatactgtggtgcactgctccatggatataaatgtaacagcagtaatatttacaaccaatgtctaattggctgtagcttgctttcagtgttcagtctaaaccataggactatatatttgtcttagcataatgccgaacatgcaagtctgcttaaactatagtcttaagatttgtgtgttttgggtttcctctacttcctctatttcctgtcttttttgggttataggtcagatgggttctactttttattcccatttcagactgtggagagcttctaaaaataccagtgtccatccctgcccctaggatctagttaatttttaaaagctctctgtgtttcaaatttgcatgtgtttctgtatgtttgcagtatctccgtgtgttttcaaatcttctgatggagcacttcgtgtactttaacccttggtctttccattgcctgtcccatttttaaattccctttttagtcttaatagctgcttgagttaggacctctggaagcaaaagtgggataggatgctgacggggaattgtaggcttgatggaagaggatgtttctatattaaatgtcatggcagatccagttctaggcatacctttaaaatgtatacacaggctgggcgtggtagctcactcctgtaatcccagcagtttgggaggcccaggcaggcggatcacttgaggtagggagttcgagaacagcctggccaacatggtgaaaccctgtctctactaaaaatacaaagattagctggacatgatggtgggtgcctgtagtcccagctgcttgggaggctgaggccggacaatctcctgaagctgggaggcggaggttgcagttagatgaactgacacaccactgcactccagcctgggagacagggtgaccaaaaaaaaaaaaagaaa

SEQ ID NO: 729 - DNA, 149 bp, Homo sapiens
agaaaactactcttttaagtgttaatagcacttgctaatgcagggtgactgacagcttggctgatagtggggtcacttggccaaatcttcgcaattatcttccctaggcctccatttcgggaattctgagtcccggtaaacggttgggt

SEQ ID NO: 730 - DNA, 7620 bp, Homo sapiens
  misc_feature (3686): n equals a,t,g, or c
agcactcaggacgagtggaccctggcctccccccacagcctgagatactctgccccacccgacgtctacctggacgaggccccctccagccccgacgtgaagctggcagtgcggcgggcgcagacggcctcctccatcgaggtcggcgtgggcgagcccgtgtccagcgactctggggacgagggccctcgggcgagacccccggtgcagaagcaggcgtccctgcccgtgagtggcagcgtggctggcgacttcgtgaagaaggccaccgccttcctgcagaggccttctcgggccggctcgctgggccccgagacacccagcagggtgggcatgaaggtccccacgatcagcgtgacctccttccattcccagtcgtcctacatcagcagcgacaatgattcggagctcgaggatgctgacataaagaaggagctgcagagtctgcgggagaagtaggtcctgcgggcaggaagtgttgcccccgcccctgggccatggcaccccttcccagttgtgagggaaccctggtgccggggctgaagtcctggccaagcagcgcccacttggagctgccaagcagggacaggggagtgatgaaggctttttttttttttttttgagacagtctcgctctgtcacccaggctggagtgcagtggtgcaatcttcgctcgctgcaacctccacctcccgggttcaagcgattctcctccctcagcctcccgagtagctgggactacaggtgcctgccaccacgcccggttgatttttctatttttagtagagacggggtttcaccatgttggccaggctggtctcaaactcctgacctgaagtgatccacccgccttggcctcccaaagttctgagatttcaggtgtgagacaccaggcccagcatccctgtggttttgagtagacagtctcccactcagagtcctctgggctgggccggcccccaccctgctgtctgcttggcttctggcttctctgggtgccatgcctcctcctgctgcacttgggggtatgtcttgggggatcactgaggcatgtgtcttcctcaccctgtctgcctctcatctgtctccttccctctttcttcctttctccttctctctctctctcccctttcattccttctctccctgtctcgcttcccaccactctgtttctggcacactctctcttcctatctgtctctcctttctttgtctctgtctctgtctctctctctcccaccctccttctttctcttcctctctctttctccatgtctctttccctcatccagcaaatatttattctgtcctgctgcggctggggggttactgggatgtccttcgggatgggagggctaacaccaaattcaccagtgcctgaaggcacgtttgtaagtcgtgtcctgttggaaatcacaggcttatgtgggaagagccgtgcacatctcctttctctcctgcgagccctctctgcacagcgtatgcacagaggctaagagagtgtctgcccaggctggcggggtggtcagtgccatacattgaggatatagtgagtgtctctgtgttcgtggagaactgaggagggaactggagctgctgggagaggcaggaaggcagggatgggtggaatcactgctggtcttagaggcctccaggaaggtggcccccattggccacatggcccaacagatccttggtggaggccagagagtggatggagcccaaggtgggtatgacctagaaccttttgggatagagggcagcagatcctgggcacatttgctcagcaggaatgtcatcctggggagccagtggtcagggtcagcaggcacaaaggggagctgagatgttgccaagccacaccccagctgtggctgctacgaagagaagcttgtagggggcaggaaggtgtggatgtgagaacactggggagaggagctgctataggctctgagagcctgggtgacaggggccaggagccagagacagagggtagagataatggggtggggactagaaatggcagaagtgattgggagccaggggcaggtggggtctagggaaagggcagggagaggaccagaagcacctcaaaggagagacttccaggagcctaagaacaggaagtggatgctgggagggccgtggagtccagagggaagtgtggggaccttttaggaaagggtggggaagattttcagcctcaactgggaattgaggtgacttggcatctgataggcagtagccagcagctccccaaccttgctttcatttgaaccctctgaataccgaggtgcctgtgcctcattgcagcatttctgccatgagcgttggggtttcctagggctccaggagccctgtgctgagcccagcctgtgctttcagatgtcccaggccgcggggctctgtggtgagcagcccaggggcagcttggagtggtccagggcaccccctgtgtcggagccacattgcagtctgggaccgcgggagctggaccatgtgggtgcggcctcggagcagagttccaacctggataagctccagcctggataagacgctcccctgcccacgcagccgctccccaacgctggggcagtcagcactctcttgaaatagtactcccttccagaagatcatctgatgctctgtctctctggtgtttgtagggagaaagccattcagagttttatttttatttatttattttgtttagtagttagaggaagtcattaaaaaaaaacaaaaagcctatgtggcaggtgttgaaattcaggagtaaaatcagaacttgcttcctcatttccgaccttgaaaactacctgtttttcttgccatcaaaggaagaggaggggcacttggggtgaaggcaaggggttacaggcctccagccagggcccctggggtggccttaggccttgcagaagctcagagcactgtgatgcaacagggaggcccagctccactccccatcctctcctctccatcctcccgtcaccatcctcccctcaccttcctcccccaccttcctcccctctctatcctcccctctccatcctcccttcaccttccttgtctctccagcttcccctcactttcctcccctctccatcctcaactcactttcctcctctctccatcctcccctcaccttcctcccctctccatcctcaactcactttcctcctctctccaacctcccctcactttcctcccctctccaccctcaactcactttcctcctctctccatcctcccctcaccatcctcccttcaccttccttccctctccattctcccctcaccttcctcccctctccatcatcccctccatcctcccctcaccttcctccccctctatcctcccctcaccttcctccccctctatcctcccctcaccttcctcccctctccattgtcccctctccttcctcccctcaccaccctcccctcaccatcctcccctcaccaccctcccctcaccatccttccctcaccttcctccccttcccatcctcccctcaccttcctcccctctccatcgtcccctccatcctcccctcaccttcctcccctcacctacctccccctccatcttcccctctccttcctcccctcaccaccctcccttaaccatcctcccctcaccatcctcccctcaccttcctccccctccatcctcccggcanctcactcaacatccatactcccctcaccttcctccttctccatcctccccttaccttcctccttcttcatccttccttctccctcctccccctccatcctcccctcaccttcctccccttggcctcctcccctctccatgctcccctctccatcctccccttaccttcttcccccttcatcctcctttctccatcattccctctccatcctcccctcaccttccttcccttccatcctcccctcacctttctcccctgcccatcctcccctcatcctcctcccctctccattctcccctcaccttcctccctctctatcctcccctcactttcctcctcctcctccatcctcccttctccatcctcccctcaccttcctccccctccatccttccctcacctttctctcctctccattctcccctcatcttcctccccctccatccttccttcaccttcctcccctccgcaccctcccctccgcatcctcccttcagcctactcccctccccattctacctccctcgaccttcctcccctctgtttcctcccctctgcatcccctcggcctcctccccttggcttcctcccctccgcatcctcccctccccatccacccctcagcatcctcctttcaccttcctcccctccgcatcttcccctccacatcctcttctcggcttcctcccctcggcttcctccccttggcgtcctcccctcggcgtcctcccctcggcgtcatcccctccccatcctccccttcccatcctcccctccacattctcctctctgcatccacccctccgcatcctcccctttgcatcctcccctgggcatcctcctcttgcctcggcagttctagactctgcccttgcccatggtcaatgagccacctgcatttcacctgcggggtgatgtgggacctgtggcagtgggctcacatatggtgtggcatggcccctggaagtcagtgagcgtctcgctgacttcttcatgccgtgttgcattggtctgagctgccttccactgtctgtttcccctgtggaggaaataacacacatttgcctgataaatggaggcagtctctagtgcctggcacctgctgatttcccttcacctgtgttcatgtttgggactttcattgcaagtatcaatgtaagcattccgagtctgggtatttggaagtttgaggcttcttagcctggcccgtgctgttgggcacgtcgatgccagaggcccactaccttgggacctccccgtttagatatgaacaaacagtgtcattttacagcccctgtgtgccgctttagagtggcccaggccaaggcacaggcagggtgcccacccttcatcccatgttctcccacgccacctccctcctggaggagctggcggtgttggaaacaccgaggaagcccatcggcgctccctcctgtcccctcctgcaggcacctgaaggagatctcggagctgcagagccagcagaagcaggagatcgaagctctgtaccgccgcctgggcaagccactgccccccaacgtgggcttcttccacacggcaccccccactggccgccggagaaaaaccagcaagagcaagctgaaggcaggcaagctgctaaatcccctggtgcggcagctcaaggtcgtggcctccagcacaggtcggcctccgggtgcagggctgggatgggagcggggctggggacccccgagtgagcctgggaggtaggctccgtgcaggtgtgacaccctcggacctggaagaccactcggggttatctccttactgaatctcctttccctggagcaggggagtcattgcagcatgaaggcagccctggtcctccgtcctcatgcagagaggcaaggcccgtgagtgggcaggggctgctcagcgttgggcctgagactctaggctgtgggctgtgccagggaagctcaggctgccctccctcacctgctcctctgcagggcactgcgtggacggatggtggctgcttcctttgacccatttcttgggtgtgtgccagccgagcagctgtcgttaggggctgggggaggacgggaggacggtgatgatctcccagtcttgttaaaggtgacacctagtcattgagtggcactggcctggccccaggcagccaccagcccacgtccctgcatgtcagggcttcctgaggcctcctgagcagcactgcagcctgcttgctggtggagagccctggcagtctgggatggagcccctgtgagcccaagtccccaagcatgccaggcaagccaccataagctcactataagcccacaaccttcagggcacacagccatgaattatacccattacacgaattcagagacagttccccaagcagttcccagagctaagggaagactgagatgagaagtacacaggccactgtgtgcctgggtgtgtcttctgtcactatatttgctcaacacaagtccagcacggcagtgggggctggtagagactgggcactttctttgctcttccccatcactcctctgtgggagatgtggccatgtgcctgtggtctgcaggagacgtgagcttccccaaggtcacccagcaataagcaggcagaacagactcaatccacacggccccgacccggcggcgcctcatcgtgcctgtcgcctcttctccccccgcccaggtcacttggctgactccagcagaggccctcccgctaaggaccctgcccaagccagtgtggggctcactgcagacagcacgggcctgagcgggaaggcagtgcagacccagcagccctgctccgtccgggcctccctgtcttcggacatctgctccggcttagccagtgatggaggcggagcgcgtggccaaggtgatttccagcttgcctgtctccgagcatgtgctagccacgtagggcctcagtggtgtccccaggagcacgcccgtgttgtgtagaggggttgcaagctgtggcaaaggctgttgagaggcttcttttaaaaaggataaaaaaaaaaaggtgtagtctttggatgaaaggaatggaattgtcccatccaccaccaagtcttgcttgtaagcagctcagggggaggtgatgctttgctagagtggaccttggggaagtggctaggactggggagggcaggggacctggcatccggctgtgtgctccggcgccagttcccaggcactggctgccccacccccacccccacagcggagccagatggtgctaaacaccgggtccttccaaagtccagagggacggctggggggacgagggcacagctttcgagctgggagtttggccttgaggaggaaattctctcgtcaacgctgcgtggacagcagcagctgctcaataaggtgctctcctgtcctcaccatctctgtccagagaaatcatggtgaccatgaagccgccccgccccgcccaccccaccctgcccgcccctctccgggctgcttctcttctgctctcccgctgcctccttcccattacatggtcagtggctttggtgctccgggctgggctagatggagccgtggatgttaagtgacgaggctggtgtggctgttggtgtggaggaggaatcgcagcaacctgtacttgatgagtgtctctttgttttcttccctttatattcatttgcaggctggacggtttaccacccaacgtctgagagagtgacctataagtctagtagcaaacctcgtgctcgattcctcagtggacccgtatctgtgtccatctgtctgtatttgttcttttgtattttatcacctcctggcccttggttttctccccccaccccctccctgtcttcattacctttcatacatttcataggatgcctcccccaccccatcgaagtcacctatttaatatcaaagtggaaccccatgagccggtcccctggagcggcggccg

SEQ ID NO: 731 - DNA, 3135 bp, Homo sapiens
agaagctgcggactctgctctaccaggagcacgtgcccacctcctcagcctcagctgggacccctgtggaggtgggcgacagagacttcaccctggagcccctgagaggggaccagccccgctcagaggtctgcgggggggacctggccctgcccccagtgcctaaggaggcggtctcagggcgtgtccagctgccccagcccttggtgagtagctgccttgtcccagagacactgccctgggtcaggggccggagcccgggcgcaggcccgggggtgggcaggcatcttggctatgcagagccgccctcactcagggcccgtccctctcttggtgacccacccacgtgtgtttgactcacccatgcatgttttgcaacaagtgacccctgtttggggtcatgcttgtgcagcgtcaggtgactcagccccatccatgcacacacaggggctggggcagcccaggggcagcttgagatgaggggagtggatttgcagatacagctgttgagatgctgacctgtgagtctcacggctcttctctttttgtgtttctttctccaggtggagaagtcagaactggcccccactcgaggggccgtgatggagcagggcacgtcctcgtcaatgacaggtaacagcttcctgctgaaccctgcgttcacaaggtgctgcctggcttccttgccccagaaccttctgcatccgcaccctcgtctttcatctgttaaggcataaaagcatttcttaaagatccttttatctgtaagggatcctttagcatccagtgtagggcccagacacagcaggagtctgtcatgatttaattcaagcttgtccaacctctggcccatgagctgcatgtggcccaagacggctttgaatgggcccaacacaaattgttaagcttcttatgagcttttttttttttttcaattttttaaagctcatcagttattgttagtgtatctcatgtgtgacccaagacaattcttcatcttccaatgtggtgcagggaagccaaaagactggatgcccctgacttaattaaaacctactgagttctagaaggagccacatgctaacactctagagagatgaagtcctctggggaaatggataaagccccagttggtgggtgctgggatgttgcagggacacgtcacagctcctggactctccagtggctgagggtctgcacacgttccggtggacccaccccagcccttgcttttcttcagcaaggttacaagatgcccacaaaaacccagccttacttcagctatagcagagcagtgcggtggggggggcgctgtgactgctgggagcgccaggtaccagggcaatccctgaagacctgctgtggggctttcccttgtggctcttggctgccactgcgtctctgtggaaacacctttgctttgcttctcatttcattatctgcatgcctcagtgtcccttctaagggagccggactgatcttgtgaggtctgaggttccttctcagcccaggatttcttgggggatgggcacactatgaatcaggactcccctgagcctcctaacggaaacctcagcgcacatcagccgcaggcgggaccccgtagtcccaggccacatttatttctagacgccagactttaagaggggtcggggcagctggctctggggtcagaagctgtgcacgcagagaactggtgatgtttagcctgaggaagataagggacagggcagaagcaagagcatcttcccaaaagggtggaaatgagaggttgtgttggagtgccagccctgaccacgctgggctgcctgtggcgctccacggactctgacttcgtgctctgagatgtgtccgtcccatgggcccctttggcagatgagcaaactgagcttcagtaacttgcaaatgatataacttgtactccaagtccatactctttccagagtgtggaactcatgggggaagctccaaggagacagattctagtttggcaaaagtgacctttcctggaggttggagccatttagaagtagagagagtgcgattgacagtgaacctcctagccctgaaggtgggcatggagatatgaggaggggagtcagatgttacatacggcttggggacacgtgacagggactggattggggctccttaggaatctgatttgggtgttgttcccttgtgagtttccacatggggtgtgcaaaggagacacgtgtacatgtgcgggcggccccaacctccccagaggctccatccgctgctgccaccttccccacggcgcataggtctggctcatgccctggcctacccacgagtttcttttgtcacatgagggtctcagctcaggcgaggcccccatgtcagcttgcttggcttttctggttgcctctttacggcaaccctgggaaaagctagtcagaaagagctccctagatggagagcaccggaatagctgcaggtgcagtgggtgacagtttttgagacaccgtgggagcagggctggaacccagccccattgatctgcgctgtgggaccctctcacatcagacgatgggatgagacagggtgctggccttcaggtgctcagagaaggcctggctgcatgagggtgcccggggctgacgcctcttctcttgcccgggtttattgggcatctgtcatagaatgccgtggggccaagacatcatggagtatttttagtttccaaaactgctgtttccaaaactgggaggagcacacacagctggctcctcccagtacccacttccattgtcctgcctgtctggaggcactcccatgggatcactttgggctgcttcgggtcagctgtgagccatctctgcctcttcctcctccttcagccccagtaacgtttctgatgttcccatagcagagtcgtctcccaggagtatgctaggctatgacagagatggaaggcaggtggcctcagactcccatgtggtccccagcgtcccccaggtaagggcgacttgacgaccccctggctggttggcagggtttgctctgtgctgatgttcacatgaaacctcttcatctccgcttgtttcccaaggatgtacctgcttttgtgagacctgcacgtgtggagcccacagacagggatggtggaga

SEQ ID NO: 732 - DNA, 431 bp, Homo sapiens
tatagcgatatcctgttttacccttgatcaattaaatcagaatctctggggataaggcccaggtacagtgatttttaaaagtacttcaatgaccctaatatgcatctaagtgagttctatccttaaatgtggtttctctcaatttgtaggtaaatacaatattttgttgttgtttgaatgtaaatatcaggcttttgatctgttctagtttaattttctgataatagtagtcccagaattttcaaatgcaattctttaagattgcaatgaagttagaactcttacgttactgtttatgtccacaaaatgtttagaaaagtttgaaaaggattttgaaaaagattaacagtgttaatatttcttatattgttgggtttatgcataatataatttggttaatatgtatcataaataaaagtattttaagatca

SEQ ID NO: 733 - DNA, 3007 bp, Homo sapiens
gtaattatttaaatggagtcagtgtgagtataaatgtgacaactatttcttcacttaaaatgccaagggaaggaggatggtaagcagtgggaatttttccttctaaagagcttttttggttttgttttgtttcaattatttagattaaaaggttagaattatgtattactgtggacaaaattacaaatcactgtaatacaatacatgtgtgattggttaggttttacttatttgtgttgaattttataatattcattagtcatttgcacttgtctgcatataaaccgtcatcttaaagtggacatctaaattccaaaaactttatctcccatctgtggttctaagtttgcctcaccagacgctactctacaaaatgtagggcatttctcctactgccacctataaatagcacaggagcggccatatgtgctgctggaaccaggctttctcacagagagccctgggcacattccagaagtgagtccttctgctaacctagcaccactcagtcccaaacatgaagtgtcccgttaatgccctgccagtacagggtatcccagctccagcaggcctttacgaagaaaaaggcaatcacactaccacaaaaactgagaacctcctacctctggacttcctgcagtgcttgttaaaactaccgattctggggctcccttcagaattcttgaggtgggtccaggaatccgcatccctgaccacttccgcaggtagttttcatgcatgcaagctcaagtttgagaagcgccaatgtggaggtattttgctcaacagtctcctggcagatctgctgccagctttgtggggcattagctgtttaccagatgatttgctgttttgaaattgaaaaaaagaaaagattcacaaaactactcctagaatatcaatcttccagctggatcacagttttctgtcttgggacttcagggtctctcacaaaggaaggtttgggtcttcagcctcattgcgaggggctggttgtccgggttgtttgtagaggttgctggggtgctcactttcatgcttgctctaaggtaatgatttcaagtgaattgctgccctcccaccatatacaaaggacttgataaaagggttttgataagttatgaaaaccaaatctcttaaactgggggaaaatagatcctgagattatgccaaagtatgtggatggctccagactctgtaggtggctgggggagctggtttccttggaaagccacccagcatggccagtgtcctgggggtggccacagtggggagggggcgctgatggcaatgatggggtatgcagggcctccagggtactcgctggccccactctgtgccatggagggtcctcccggtcagggctgtcagggccttgcgtatccaatgagagcagtgcgtctcccgagccgttcttagatcctgtgtgtgttaccttcacagtggactttctgtcttggcacatgtaaacatagtcatgaacatccgcggatgtacatagatcagccctctgtgttttcaaaaacaagaaatcaaatattttgcagtctggtatattaccatgaaatgaaaagaactgtgcatttctgacctatttcaccatcttctggaaatgattttgcagacttgtaaggagactgagtaaaggaagaggaagaaagcaggcatgagtgttgaagttcggtttgactcatgtcatgtgttctttacgttccttttgaatatattaaatccagtgtggaatagctgccttaggaccttgacccacacttactttaagaaatcgttctagttcttaaatttcaatggtaaagccagaggctggtgcttgaaaagtatttacagtgctcaggcagcactttctgcagttacagattctttactgcccctttttatgtctgaactttacatactggattactcgtgtcaataggagaaggaacagtgccttgatttaacacgtccttgtaatagtcgtggtccttctcttctgggaaaggagaagaaatagtgcccctggagtcccattgccttgggaggcatatggctcgtttcagtgattccttgagaattctggtaagaagtcaaaaataagcatttaaataaaaagaatagtaaaaaccacagtaaggaaagagcttctgatccatttagtaaaataaaacatacattttataaggtagaaatattaaatagaaccatttattactctaaattctatccttatttatctctcaaaataatagaacagtgccacttttgataatttttctatttgcacacccaaaatgcctgttttaaaatatataatagagaatgaagaaatttggggaatttcagaccaacaatgtgtttatattcatgtaagtctgattttcaaatcagtgtaaattgtcagtaatttccataatacatattggcctagttctgtatgcttacaagttgcgtttgtgtacgctagcacatttaatgcgtaaaatagaatcttactattcctgccttcaaaataatattcatacataatttattgtaaatactgacaaaactaccacttaaaaccattggagaagctcgatgccacagaagccatgtgcccatgactttaccactttctctggaattgttttggctgtcattcctttgaacccgctctgaatcaactagccaggacatgtggactcgcatacataagcccctcttttcgcactcatcctgctcttttatccttctattcttctgaaaagggtgttttttaatgtacaggtttactaattcatatctcgttagaccccagagacaaaactgcgtggaagcagtccagtccactgctttgaacaaggcggtcttcgcggtgtaatatctctcagctgcttgaggtttcacacattcacaaaaataacagcatttttagctgatcccaatagatttttctctgcagctgcatcacttgaaaaagctttttgttccagttcttaaagtctaagtattgaaagtaatttgaaaaaaa

SEQ ID NO: 734 - DNA, 373 bp, Homo sapiens
agacaatgagtaccactttttacataaagtgatgtgtatttccagcgacctgttactctctgtcacatgttaaaatggatctcacgggaggattccctccttcagagactgcagggcgtggcttagccagtgtgtatcccgtgatgccccgtgatgcgttaggaatgcatgggacagccagatccttggttctttctgattacattttttcatttcttctgccttccacctcctttctggcctctctgtctttgaaagttcatgtccctgtgtccggcggaacagccagtgagaggctgggctcgcctcctgtctgagcttctgcgtcgttgatttctaggacctaattgaagggtgacattccatgataatt

SEQ ID NO: 735 - DNA, 463 bp, Homo sapiens
cagtcacttagtatttaaagtcagtttagtgtttgtggcattcccgctgcttttatggcacttcagtcattttttagcacacttccatccatactacatgtgtccttttttccccttaacttctctaattgtgtttcttatccttttctttaaaaccattgcttcatctgggagtggtggttcatgcctgtaatcctggaactttaggaggccaaggcaggtagatcacctgaggtcaggagttcaagaccagcctggccaccatggcgaaacctcgtctctactaaaaatacaaaaaactagctgggtgtggtagcaggcacctgtaatcccagctactcaggaggctgaggcaggagaattgcttaaacctgggaggcgaaggttgcggtgagccgagatcgtgccattgcactccagcctgggtgacaagagtgaaactccgtctcaaaaaaaaaaaaaa

SEQ ID NO: 736 - DNA, 3813 bp, Homo sapiens
gcctaattaaagggaaagcaagaacaagtgagaagagagaaactggagatagaagtttagatagtactttgaggaattttgttgtaaaagataggagggaaatggaacaatactagaggaggaagtagggctaagggggattttttgtttgtttattattatactttaagttctggggtacatgtgcagaacgtgcaggtttgttacataggtgtacacgtgccatagtgtttgctgcactcatcaacttgtcatctacattaggtatttctcctaatgctatcccaccccagtcccctgacccccaaaaggccccggtgtgtgatgttccgctccctgtccatgtgttctcattgttcagctcccacttatgagtgagaacgtgcagtgtttggttttgtgttctggtgttagtttgctgagaatgatggtttccagcttcatccatgtccatgtccctgcaaaggacataaactcatcctgttttatggctgcatagtattccatggtgtacatgtgccacattttcttaatccagtctatcattgatgggcatttgggttggttccaagtctttgctattgtgaatagtgccacaataaacatacatgtgcatgtgtctttatagcagcatgaatttataatcctttgggtatatactcagtaatagcatggctgggttaaatggtatttctagttctagatccttgagcagtcgccacactgtcttccacaatggttgaactagtttacagtcccaccaacagtgtaaaagtgttctatttctccacatcctctcttttaattgtgatgttaggatgtcgattttagatctttcctgctttctgttgtgggcatttagtgctataaatttccctctacacactgctttaaatgtgtcccagggattctggtacgttgtgtgtttgttctcatggtttcaaagaacatctttacttctgcctccatttctttatttacccagtagtcattcaggagcaggctgttaagtttccatatagttgtgcggttttgagtgagtttcttaatcttgagttctaatttgattgtactgtggtctgagagactgtttgttatgatttccattcttttgcatttgctgaggagtgttttacttccaattatgtggtcagttttagaataagtgtgatgtggtgctaagaaaaatgtatattctgtcgatttggggtggagagttctatagatgtctattaggtctgcttggtccagagctgagttcaattcctggatatctttgttaattttctgtttcattgatctgtctgttatcgacagtgggatgttaaaggctcccactattattgtgtgggagtctaagtctctttgtaggtctctaagaacttgctttatgaatctgatctgagtgctgctgtattgggtgcgtatttatttaggatggttagctcttactgttgcactgatcccttcaccattatgtaatacccttctttgtctcttttgatctttgctggcttaaagtctgttttatcagagactaggactgcaactcatgcttttttttcttttttctttttttttttttttttttttgctttccatttacttggtaaatattcctccatccctttattttgagccagtgtgtgtctctttacatgagatgggtctcctgaatacagcacattgatgggtcttgacactttattcaatttgccagtctgtgtcttttaattggggcttttagcccatttacttttaaagttaatattgttatgtgtgaatttgatcctgtcattatgatgctagctggtcattttgctcattagttgacgcagtttcttcatagcgttgatggtctttacaattcggtatgtttttgcagcgtctggtaccagttgtacctttccatgtttagcgcttccttcaggagctcttgtaaggcaggcctggtggtgacaaaatctctcagcatttgcttgtctgtaaaggattttatttttcctttgcttatgaagcttagtttggctggatatgaaattctggattgaaaattcatttctttaagaatgttgaatattggcccccagtctcttgtagcttgtagggtttctgcagagagatccgctgttagtctgatgggcttccatttgtgggtaacccaacctttctttctggctgcccttaactttttttccttcatttcaaccttggtgaatctgacaattatgtgtcttggggttgctcttctcgaggagtatctttgtggtgttctctgtatttcctgaatttgaatgttggcctgccttgctgtgttggggaagttcttccggataatgtcctgaagagtgttttccaacttggttccattctccccatcactttcaggtacaccaatcaaacatagatttggtcttttcacatagtcccatatttcttggaggctttgtttgtttcttttcacttttttctctaaacttgtcttctcgctttatttcattgaggtgatcttcagtctctgatatcctttcttccacttgatcgattcagctattgatacctgtgtatgcttcacgacattctcatgcagtgtttttcagcttcatcaggtcatttgtattcttctctaaactggttattttagttagcaatacctctaaccttttttcaaggttcttagcttccttccattgggttagaacatgctcctttagctcagaggagtttgttattacccaccttctgaagcctacttctgtcacttcgtcaaactcattctccatccggttttgttcccttgctggtgatgagttgtgattctttgaagaacgggcattctggtttttggaattttcagcctttttgcactggtttctccccatctttgtggatttatctacctttggtctttgatgttggtgaccttcagatggggtctcttagggtacatcctttttgttgatgctgatactattcttttctgtttgttagttttgcttttaacagtcaggcccctcagctgtaggtctgctggagtttgctggaggtccactccagaccctgtttgcctgggtatcaccagcggaggctgcagaacagcaaagattgctgcttgttccttcctctggaagcttcgtctcagagggtcatccgccagatgccaggcagagctctcctctgtgaggtgtctgtcggcccctactgggaggtgtctcccagacaggatacacaggggtcagggacccacttgaggaggcagtgtgtcccttagcagagctcgaacactgtgctgagagaaccactgctgtcttcagaactgtcaggcaaggacgtttaagtctgctgaagctgcgcccacagccacccctttccccaggtgctctgtccatggaagatgggggttttatctctaagtccctgactggggctgctggcttttttcagagatgctctgcccagagaagaggagtctagagaggcagtctggccgcagtggccttgctgagcttcggtgggctctgcccaggtcgaacttcccggtggctttgtttacactgtgaggcataaaccggctactgaagcctcagcagtggcggacacccctccgcctaccaagctgaagcatctcaggttgggctcagactgctgtgctggcagtgagaatttcaagtcagtggatcttagcttgctgggctccgtgggggtgggacccaccaagccagactacttggctccctgtcttcagccccttttccagggtggtgaatggttctgtttctctggcgttccaggtgccactggggtatgaaaaaa

SEQ ID NO: 737 - DNA, 23027 bp, Homo sapiens
cgccctagggggcgggcactgaagctgcggcttgcggttcagcgggttctagggcgccgggcgctcgggcctcggccatggctcacaggccgaaaaggacttttcggcagcgcgcggctgattccagcgacagcgatggcgccgaggagtcgcctgctgagcctggggcgccgagggaacttccggtcccgggttctgcggaggaagagccgccctctggaggaggccgcgcgcaggtggcgggactgccccaccgggttcggggccctcgtggccggggccgggtctgggcgagctcccggcgtgccaccaaagcggctccccgcgcggacgaaggctcaggtgtccagggagacgcggggaagcggggaggtgacggcacagggcgggaaggggccgcggggtctctggatccttctctgggggttctataacttgctgccgaccacaagccatgctgagtcttatccagaaagacttatccagaaggtagtgagcgagaaaatagctcgagcacttgcccgctatctgcatctgccttttggactccttgggggaaataaaacaatcgtgtacagttgggaggctcttcgttttcaccatcagttgactccatcagttataactaacacagttatcaaagtttatgaagaacctaaactgtcacaacaaagttcaataatttataatactattaagtgggcagaagttatatgtaccttttagacacttgaccaacttatctttcttgaaaacatttagccagagtagtacaggaatctaggttttgggacattcccctttgtttattttcttttttcaccagttatttgcaaaaactaatagtaatatatacaacacaaagaagcatgatagagattcatgacactgtagatggtaccagtaatggtgttagatatagtgtcgtcattttgaagtacctttgagttcttaaatacaggtgtaaggcagcataaagttgtttaaataaaatgtgctgctctgagttggaattgtagcttaatgaggaatacggtttttggttagtcttgagagctaaaatcttcctattattttttattgtcattaaagtgatttttattaatttattgagaagtaaaaaatgtatatacttatagtgtacaacatgatgtttgaaatgtgtctacagtgactaaatggagctaattaacatttgctttaccttaggtacttacttttttttgtggtgagaacacttactatctactcttactaattttcaagtatgcaatgcattgttattaattttagtcaccgtgttgtagaatagaattcctcttgtctaattaaaatgtgtgccctttgaccagtatcttcccaactaccctcaacctcactcagtcccttctaaccactactcgactctctgcttctgtgatttctgatttccacttttttagattacatatgtgagatcatgtggtgtttgtctctctgtgcctgtcttatttcatgtaacataatgtcctccaggtttatgatcttcgtgatttcttggtctttcttgtgaccttctatttgtctaaagttttcatgaccttttatatttgttttctggttaaactttgtagatgaaagttgaagtcaggagttccttttctcttgccttctagaatagtggttctcaaactctttgggaattggacctcttttagactcttagaaatgattaaggattccaaagagcttttgtttcagtaggttatacctatcaatatttatcacactaaaaataaaatttattaattcacttacaaaaaatctattacatgtaaggataagtaagatttttgtgaaaagtattaccccaaaaaaggaagagtagcattgttttcaatttacagatctctttaatgtctggcaaaatattaatagaagacagatgaattgtcataggtgtttctgcttttaatctcttgtgctattttgttttggttgaagtatttgaagaaaatacagcctctgacagatacatgattaagacgagtacttaatagcatttttagatcattgagggtgttgtgctttaatataacacagctcaacaagtaataaactaacccttcttaaaagttagttgcgggccgggcacagtggctcacacctgtaatcccagcactttaggaggccgaggcaggtgtatcaagagatcaggagttcgagcccagcctggccaacatggtgaaaccccatctctactaaaaatacaaaaattagccaggcatggtggtgggtgcctgtaatcccagctactcaggaggctgaggcagagaatcacttgaacccgggaggcagaggttgcagtgagctgagattgtgccactacactctagcctgggtgacagagtgagactttatctcaaaaaaaaaaaaaaaaaaaaaaaaaaaagttgccaaatggattcttaaaccatatgattaaatttggggtgctcttaccttaaaactctgttctgttttgtactttggatcttttactcatgaacgattggtaacatcttgcattatttggaaggtattcattagctgagtttgcagatcttgcaaatgttggagcattttattgtacaataccaaaaaaatcatagtattaccactgattaatcagtctgtaagtactggaaagctgttaggttcacagtagagaatataagttttccaaaatctcaattttcacttgaaatctctcattttattgataggcacaaccgggctcatgttttgagaaaatgtttgtcagatagccatgtctgaataatcggtttgttagtcattctttcaagtaaaatggtgatgcttcttaaaaacaacgtctagttcagcttgcaactcagtcacacaaatgcttttccttaaggcagccattgcatttcaagatgcagcaaaagtgccttatgaatactttgattttgtcacaaagaatattaaacatgtgtactcaagggtcaaaatttaataaaataacaattttttaattagttcatgaagagcaactggcttttttctgccatgtgaggtaaggaaaaataccataactgctactacaaattgattcattcatgccaagagcctagcagttttacccatcactgcctttacttcattatataaatatcaacatggtaaaaagaacaaataacatgttattattgtgatgaaagtagttttaatttcacagactctctgaaagagtctcaaggacctccagggattgataaaccatgctttaagacccactgctttggtgttaatccactttggaaacaggtatgggttgtcataaatgacaatatctaagaaagatgtgagctgcagctatattttttttagtgttttaaattttgattttactccagccttttttgaactgtatgtaggtcttctaactaaggtagaaaattaaaattaatgagtagtatgtaatcttatgttttaaggttactcataaagattgcaaatttattgtggattaagaaatcctttcttgtcaataatgtcaagaattcctttattttgttcattcaattttcacaacacccctgtgggttttatcttggtgttatctttgtttaacagattaattgaatttaacagactatttaccttcccaaatcatgcattgaaaagatggacccatggtttaatattgaccaaagtgctcgttacaatatttctcgccaccagccgttgaaatatggcatactataaagagagcctaagttctgaagttgcctgggattaggttgacagccctgcttctccactgcccgagttggtgttctttatcctctcaatccttagtgaactcatcagaaattgcatttactttatagaattacaggtattaaataagtcatgtaaaacaggtttcagtgtgcctagtacatagtatacattaaatatttttcttttctacttattcacaatcattactattctaaatattacttcattttttgtcgctttttttttctctaatgcctccttcccttttctcattgcatacttttggaaatatattattagatgcctagataatacaaatagggtctttgtacacttagtagatcattcagttgcttaagaaagaaagttggaggaagatcaatatgtctactttaatatatggactaggattaaaacaccgtattatacatatgccatgtgttgttcagaatttcaattaataattccattattttgactcttttttgttgtatttttaaaatgtcctgttagaatccagaacccttgatgtgtccacagatgaagaggataaaatacatcactcctcagaaagtaaggatgatcagggtttgtcttctgacagttctagctctcttggagaaaaagaactttcatcaacaggttagtaatttgtatgattttggttaagaattttatttttaatatagtgtttttgatatagttattaatgacataacaaactctagtgacatggggcaagtaggtcattaatgatgattgtcagagtgccaaaattgctcatttttattacattttaacatgcacaggtcagacagcttataagtagcagggctaggattcaaacccagtttgttctggagcctgtattcttcttaatcactgtgctatactgggtgattgacattgatacttgaaggatggtaagaatttgtcagggaggatgtttcaggtataggatgtagcatatctgaaactctagggaaggtatgtaatatgtgcaggaagctaaaaatagctctggctgaaagtatttggttgcgagtttaaggaaaagaaaacaggaaggacaagttggagtcagattatacagggcttagggaaccactgaaaattttatacagatgacatgaatgtttttgtgtcttagaaagatcagtctagttcaggggttggcaaatctggcccaccacctgtttttgtaaacaaagttttattaaaacacaatcacagtctttcagttacttaatatttgtgggtgcttttgcactgcagcagcagagttgagaagttgccacaaagaccctatggcccgcaaagtgaaaaatatttatctggcgtcttacagaggtttataacttgttttgtgccgtggactcctttttcagtctagtgaagcctaagatcccttctgagaaaataaagtaaaatacatagctttgtagaggaaacaaattatattgaaataaaattattaaaatatattttatgacgcttgtaatatagtaataagtgcttctgtgcttctttttttttttttttttttttgagatggagtctcactctgtcgcccaggctggagtgcagtggcgcaatctgggttcactgcaagctccgcctcccaggttcacgtcattctcctgccttagcctcttgagtagctaggactataggccaccacgcctggctaattttttgtatttttagtagagatggggtttcaccgtgttagccaagatggtctcgatctcctgacctcttgatctgcccacctcggactctcaaagtgctgggattacagacgtgagccaccacgcccggccataagtgcttctttattagcctattaaataacaacaaccagtagctctgtaaccttgtaattttgtttcttctccatgtccacaaggtacagaaatactaagcgattaagccaatattaagaactgaaatctagtaaacagttgaagccttgtctggattctagatacagtgctattcagtaaaattttctgtggtttggaaaaattttctatcttcactgtccatatggtagccactagtcacaagtggctgttgagctcttgaaatgtggctatagcgagactgagaaattgaatttttagttatatttgaatactcacatagggctagtggctactgtaccaaacaatgctactataaaagatggcggattagactaggtgccatggctcatgtctgcagtttgggaggccgaggtggatggatcacctgaggtcaggagtttgagaccaacctggccaaaatggtgaaaccctggctttactaaaaatgtaaaaattagccaggcatggtggcatgcacctgtaattcaggggactgaggcaaaagaattgcttgaacctgggaggcagaggttgcagtgagcagagatcatgccagtgcactccagcctgggcaacagagcaagactccatctcaaaaccaaacaaacaaaaaaagatggtggattaaacaggataaggcagtggttgtaaagtgttggcagcactgcccccaccttaggagagagggcagcgtttgaaaatgtgtgggattatttaaatgattatagtagttgagttgttgctggcacatagtgccctagaggcaagggatgataaatgtcttaacaggagtgcagaacagttcagcgcagtgaattgcccatcccctatgcacattgagaaacgctgattaaaaattgaaaacttgtcctgtgaggaacacctgaaagttcgaaggacttattggctggcgaagaaaagatggaggaatgtgttaattttaagggctggcatgtggaagaagagcatttatttgtgttccgatgaataactgcctcaaaatagtccctctagcagagattacttgttactaatagaagatgataatttacctctcagccctagatgattgcatatcagataggatgatatatgtgaagaattattcataagttataaatttgtaaaaacatgatgtatttattattgaacaatatgctgacattattgattcctcctatgtctgcccagcatctgctgtgtgagaacccttgaacgaggtattgaatatgcagaaacaggacaaacgcaatactcttctcttccttggttttttacttctttatttttacttgagcagttacctttatgtagcactaatatcttactagtgtgtcccattgcttgtgacttactaattaaaccctaccgagtcacctgcaagaaaatcacttccaaaataagtatttctgtgtccacattcatacacttgagtatttgaacctaaatgtcttatcttaatcctgcctgcacattaaaatcctctagggagctataaaaacatacttctgctcagctctgcctcagatcaacatctgaatcactggtatagaggcctgggtatgtcaagcttctcaggtgactctgatgtgtagccagggtcgagaattgctactataacctgctgtgatggttttgaatcttaaatgctttgggaggaggaagagacacctgaccttcatcatgtccctgacagtagtctataaataattactaatctataaaaaagcaaatcacttcattttctattacttgttcttgatgaatatttattgacttctagtgatttctttattgcttcatgattcactcaaggacttttaattttccctagggctgatgtcaagcatattggtctgtgatttctaaaatctttctctttttttgtttgtttcaaacatgggagcttttgtgcatctccaagtacatggcatttttctgtttatttctcaaagaatttgggtcaacttgtgggaaagtttagaaaatttcacttcagcctcagtagcttgacatctttttagtagtttgaagtgcttaaaatggtgaaaatttctctcgctgtttctttaatgtagtatttttcttaagaaaccgttttttccagaatgaagataaatttcagcttagatcatgcatgaagaaactcgttttaaattggaagagtttatgctaatgatatttatgctgtacaaaataaagaaaaaaaataagactctcttaagagttgttgtcatttaaaatttttcacctggtaaatgagcctgattattttctttacacttcttaatgtctcatgtttattcacgtggggctcactacagaaccgcagaggctaatttggctttgctctgttactgtttgtagtatgtttgtgatttcttgtaagtgtgggtaggagggaaggaggaaggaggacatcatagtgtagtatctctcttacttggtaagtcaggctggtctgtcattgatccttctaacttctgtagctctcactgattggggaacaccacactcagccctctccacatccctgcgctgacaatctcagagcttccagaaatgagaaatagcgacccctcaacaaagtgagcagtacctgatgagtaagagagttaaaagataaaatgaagcagtttcagtatattttctgatacttctagatttgtttgatttttctaagttgtatttaatctctattaagttttcttcctttgctgatacagattttgagccatttattaaagtcacattcatatatcaaaatagcaaataatttaggaaaatggtgcttttttctttttcttaaatgtgaggaatatttacttacattggtctttggtttttagtgtcctcgtctttgtttccttcagttaagatcccagatgcagcttttattcaggcagcccgcagaaaacgtgaattggccagggcccaagatgactatatttctttggatgtacaacatacctcctccatctctggtatgaagagagagagcgaagatgaccctgagagtgagcctgatgaccatgaaaagagaataccatttactctaagacctcaaacacttagacaaaggatggctgaggaatcaagtatggatttaccaatatatgaagattaggatattttttattagaatataatatgagagaatctccataaaaaatgtaatatgctggctcacattttatagtgttgataatggtttttaacatcgatttggtccatgatattgtgacctctaaaagatgtatctgtatcaaaatgttattatcaaggagtatgtgtaataatgtttattaatgcctgacctcccaccttgatgtttttggacaggttaaaaaaaatgtgcagtatcttactttcaaagcattgaaaacgatcgtttttacctgtataaatatattttttttaacatggaagcatctatagagattttagatgtcatgtattaaaatcttccctgctgtaataaaaaatttcctctaccaataatactaagccttaaaggactgttttcatatttctcatttatgatatatgcatttgaccaaggttttggtaactttaaataatatttttttcagaaaaggacttagttccttacaatttatttttaagtgtttggattctcaggtagtaattgagagatctttgataagaaaaaccaaacatttcattctttctcagttttttacaatatagggctatagtgttttgagtgggacagtttagtgataggagtgcaggttatggagtcagatcccaggatccagcttccagcttcaacatagtcctaagacagttacttaacctcccaatatttgcatttcctcatttgtgaaatgagggcagtaatagtgccttcttcccagaattattatgaagaataaataacacgtcaagtggtgctaagcctttgtataatctcaaaaaatgttggcttgctgcaattaaaatggaaaaatactaaacgtttacatgtgagctttttttccgctagtaagcagaaatgaagaaacaagtgaagaaagtcaggaagatgaaaagcaagatacttgggaacaacagcaaatgaggaaagcagttaaaatcatagaggtaatcattttttatcccatgtgtattagattcctgtggctgctataacaaattaccacaaacttggtgactcaaaagaacacacatttattctctcacagcgtggaggccaaaatctgaagtcaaggtattggcagcaccttgcttcttccaaaggccctggggggttgtggggagcggtaattcttccttgccttttgcaacttctggtcattccaggtgtttcttggcttgtgactacataactcctctctctgcctctgtcttcacgtggctttttccatgtctctactgtgtgtttttctcgtaaggatacttgtcattgggtttagggcctactcagataatccaagatccttcacttaattacaaccacaaagactctttttccaaataaggtcatgtttgcactttccagggattatgtcatggatgtatcttttgggaggcctccattcaacccactacactgtgcatattatcttattttccactagattataaataccttccacttgagggtactatttttttaatctttaattttatagtaattgacagtttatattgtacaggtgcttaaaagtaaagtttagccctcaagctttacttttaaacgcctgttctgtataatacaaatatatccaattttctctttggagactgtttttttcacttcacaatacaacagagacatctcaccgcaatggtatatctacttcgactacaccttaatgatttcatagcaatctagtgaatagataatatatatcatttatatattaaatctcattatgtgatttctcatataattttttattgtagtgaaccctatggtaaatattatacacaaatatgttatacctatattatgatatgtaactgttacatttctgcatacacaaataatagttttgtgttttatttaattttttaaaagatgtaaacaaagtaaatatccaacaataggggtcttggtacaatacagtaaggtgggatgaagtgctaaaaatggtatcagaaaccaaagctcgggaggctgagtcaggtggatcacttgagtacaaagaagactagcctgggcaacatagccaaaccctgccgctacaaaaaatacaaaaattagccagtcatggtggcacacacctgtagtcctagctgcttggggggctgaagtgggaggattgcttgagcccaggaggtcaaggctgcagtgagccaagatcacgccactgcgcttcagcgtgggtgacagagtgagaccctgtctcatttaagaaaaaaaaaaaaaaacaacgttaaagcccagatttggccaggcatagtggctcacacctgttactccagcacttcggaaggccaaggtggaaggatcacttcagcccagtagtttgagaccagcctgaacaacacagtgagacctgaactctactaaaaacaaataaaactagccaggcatggtggcgcatgcctatagtcccagccacttgcggggctgagctgggaggatcacttgagcccaggagttctgggtgcagtgagctatgatcacaccactgcactccagtctgggcaacagagtgagaccctgtcactaaaaataaataaatgaatgaatgaatgaatgtaaagtttaaacaagtagtgagctttgaaacataacaaatgtactgtacttggggttaaaagtcctagatttgggctgtgggtctgctgctagaatataagttctgtgaggtcaagaattgcaatcatagtgtacatcagagattcccaaactttctcattcatggagatgttagtgtcttggtaattttatcatgatacttgtaagccaaaagaagtaccaaacagttctatttattaagtagtccaaagaattttatacaatttatgtcctaagaactaaccatttggaaaaaataatacagataaattgaaggcaaaacatttttatctttttttaaataaccaaaattccttactaatgagatgtgtgttcctgttaggcattgcatgacttttcagaccttggagtcagattggacactgtcactctcatttccatactgatgttcacacaatacttgtttttatcatagcatcctcccaaaacccagctccacaaatatgacttcatcaaaaggaatggaacacattctttttttttttttttttgagacagagtttctctttgtcgcctaggctggagtacagtggcatgatctcggctcactgcaacctccacttcccaggttcaagcaattctcatgcctcagcttcctgagtagctgggactacacgtacataccaccatgcctgactgattttttgtattttagtagagatggggtttcatcatgttgcctaggctggtctcaaactcctgagctcaggcagtctgcccacctcaacctcccaaagtgctaggattacaggtatgagccactgtgtctggccatatggaacacattctaatgtaactgtgaactaagagctagtagtccaacagatgttgagtattacggtttttccctaaaaaatttaaaatgtctcactacacccctttaaatttgctaggatgcctttgcacacagtttaggaaccacaatatgcatgcaattttgaattctgatttccttgcttgacatattataaattatcttctcttgtttttatatcgttataacaactgattttaatagctatataatattcactggagtcactgaatcataatcttaaccattcttcattttggacattttaggttatttgcaatctgatttttttaattaacaaataagaatcagtgaatatttaattattttcctcctctcctttcttttgttcagatgtgtgtttttgaactattcctttgtaataattgccaagagttgtattactaatcgagatgaacatttttatggcacttagtatatttttctctattgccatttaaagaaaacttagctcaatctgtaatgtcgccaatatcatgggaatattttaccataatcttgccctcttcaggtccaagtatagttggtgaaaatggaatctcacacttatttgattttcatttttattgctaatgtgagtacatttactgattcctttattgaaaatctaccatttgccactgtgttactttcctgtggctcctgtaacaaattactgcagacttggtggcttaaaacaatagaagtttattcgctctgaggtctggaggccagaagtccaaaatcataatgtcagtagagcaacccccctttccagaaactctgtaggagaatccattccttgactcttctagtttctggtggctgttggcatgccttggcttgtggccacatctctctttgttgcatcttcacatctgcttcttctcttgtgtcccaaaattccctatctcttaggatggtacatgtaattgtattcagaccccatcgggataatccaggatatacaccacatctcaaagtcttaattacatcttttgccatataatgaacatgaacatgaatgtgaacatgttttcatggggtcaccattagcctgctacggccagttacaatgatgtacaacctctgcaggaagggagacaactaaacaaaacaattatagtgaaatcctacaggtgctgtgacagaactctgtgcagggtcctgaggtggcacaaaggagcaagtgggtgatcagttttataggagggaaggtaagtgaggaagtctgagaaagcatttatggaagtggtgatatttgaatgggttattgactgcaaaatatcaagagtgtttggagattttgtagatatgcgtagagctggatgggaggcttggtgagaactgaaatgacaaaagatgatgcttcatggaaaatataaaaagaatagctaagccagtgaaattggctaaatatctggtcagttttcttcatgtgtctttgtgtaaaatagaggttcttcaggatcttttgaacattccaagcatggaggagctgtgattagacagaggacactaatgtgaaacataccatgttataagatatatgttaggagtgcatttctttacaaggaccagaaaacccaaataagaatgtcttggctgggcgtggtggctcatgcctgtaatcccaatactttgggaggccacggcaggcagatgacgaggtcaggagattgagaccatcctggctaacacagtgaaaccccatgtctactaaaaatacaaaaaaattcaccaggcatggtggcaggcgcctgtagtcccagctactcgggaggctgaggcaggagaatggcgtgaacccaggaggcggagcttgcagtgagccgagattgtgccactggactctagcctgggcaacagaacgagactccatctcaaaaaaaaaagaaagaatgtcttaaagaaaagtaaaaactttacctacaaaccctccagcacacttccatttacttttcattgactagaatggagttgcagttaaataggtacttctatcatggaaataggtgttaggtcagccagacaggtctgtctactccacaaattaatattcatgaaggattgttgtttcttaaaaaactgggtgactttctgagagtacattagaccataaccaaaattagcttcaaaactaaacttttttaaaaatgtaatttttagaatttgcttcttaaatatgaatttaaacttctaaattttaaaactgaatttaaaaacattttattgggaccatgaaaaattacaaagacatggaattttttagcttgaagagaccttggatcatccagtccctttacatgctattaatgtttcaaaggtaaatgaaataaatggttttgtaaaaatctatttttacttttttaggaaagagacatagatctttcctgtggcaatggatcttcaaaagtgaagaaatttgatacttccatttcatttccgccagtaaatttagaaattataaagaagcaattaaatactaggtgagcaatactcattttgaaatttacatttgtcctagatatttaatactaaagatataacactatattcttttagattattaagtactgatattaaacagacttatgggggggaaaaaggatctcctgtgttatcatactaacacaatttatttcatttttgtatacactagtcccccccatatctgcatttttgccttctatggtttcagttatcggtagtgaaaccatggtccaaaaatattgaatggaaaattccagaaataaacaattcatatgttttaaattgcatgctgttctaagtagtgtgatgacatcttgagctgccctgcttcatcctgcccaggatgagaatcatccttttgtccagcatctctttgctctgtaagccagcagcctgttagtcacatagtaaccatctcagttatcagatcaactattgcagtatcacagtgcttgtgttcaggtaacccttattttacttaataattgccccacagtgcaggtgtactgtatgtaatatataaattaaactttatcatagttacctatgtatagggaaaaaacagcatatataggctttggtattatttgcattcactgggggtcttggaacctatccccatgattaaggggtgactacgatatgtctttttagtctttataacatattttacgtggttaaaatcagtaaatacaaaattctacttttctatttaatatgattataagcatttttctatattaccaaaaagcctttaatttttttaaaaaaactatcatgtttgtccatatagttgttatatcataattaaatacttctctgttggacattttgatctagaacaggagtcagcaagtcgtctttttgtgtaaaaggctggatagtaaatattttaggctttaagggctagatgattgctgttgtaactgctcaactctatgttacagcatgaaaacagccatagacaatatgtaaacatataagcatgtatgtgttccaatataactttatttataaaaacaaaggatggactggtagtttgccagccccctagaatacaaagataaccttgcatgagggataaaaaagaggcagcagatcattgatttatcgtagcattttattttatctggataactttattatattttattttttattaactaggttttttattttaaaaagaccatacactctcattgttaaaaaataaaataaccagtggaaaggatatacagaacgaagtaaattaccaccctccctagaggaacccattgctaccagtttcttatgttttgttccagaagtggtctatatgtatatctttataagcacatgtatacttatatattcccgtttttatacaaaaaaggacattatataccctgctctgtacctagttttttccacatgatatttacttacaagttcactgctatagtcaaaaatattctacttaactaaaacattttattaataatgcctactatacattattatcttgattaatttcttaattctcactctcctttatataaagcaaagaaagattctgaaagacaaatgcaagaaaacttgaagagagaatatttggcctaagcaagtgctaaagggtttccttttattgtggtgttctttgcttatctagtctataaacccagatttatatgattgtcagtttccttggtggtctttgaaaatatttacattagattgctacttttaaaagagtatgaaaaataaactaatttttattttatttatttagattaacattactacaggaaactcaccgctcacacctgagggagtatgaaaaatacgtacaagatgtcaaaagctcaaagagtaccatccagaacctagagagttcatcaaatcaagctctaaattgtaaattctataaaagcatgaaaatttatgtggaaaatttaattgactgccttaatgaaaaggtacatatcaatatttatttatatcatttccttttttggagaaaaccccttgtgcaattaagaaaagtctaaatctcacaattagatacttttctctagtatttttcctacacatttttaaaataagatgatagcattctcttaatgttggatattcaagttttttgcaactattttattattgtaagtaacattgtataaaattttgtatataaatttttgttataatttcttctgtttaaggaaaattccttgaaaatgaagtcaaataaaatgaattattaagtctaaatatttttaaggcttatgaaacattacaaaattgacctccagaaagattgtgccagttttattagtttactagattaggaataaatggattttgtttttacatatcatattttgatctcaagcaaactctttggttttctgcttgtgaattatttgtttcttgtctttgcccttttatctttgtggttcttagtggaaatttttttctttttcttttctggttttgttagagtatgaacaattctttatagcttaaaattttttaatgttttatcctacttaatgtgaacttaccagttttgtcttttgaatttgtttgtaatggtttttctttcaacattcagatgttttgaaatttttgtttttagtttttgttttatgcatactaagtttttacattggggcaggccttcagttgtctgtttttaaaaatagattaaccatttcaataaattattctctactttccacatttttgttatttttattttatttatttttctagtgagggggacagagtctcgctctgtcacccaggctggactgtagtagcacgatctcagctcaatgcaacctctgcctcctaggttcaagcgattctcgtgcctcagcctcccaagtagctgggactacaggcgtgcaccaccacacccagctaatgttttgtatttttagtagagacggggtttcgccatgttgcccaagctggtctggaactcccgagctcaggcaatccacctgtctcagcctcccaaagtgctagggttataggcctgagccactgcactcagcccacattattttttgtttataattaaaacaatgagatgctttgtcccaattgttgttttaagttggctatcttctactatcacttggtagttactttctgaagtatttattacaatgtaattttcttttttcatttgcccttgaaaaattacactgttaaaattttgtcagcctgtgcattaatgtactcatagcagcagctgtggagtatcaatggagtaggaggaattgttgctccccaaaatatgagagtttcaatttcaacaagtctcatttctgtatcacatcacaacttacttacctgactctggttagtttttctccattccccgatttttcaaatttcaccagctttgagtgcccccacctactttccacaccctcagcctggaaaacatctgtacccttcattttttcctattcttctgtctcaaaaaaaaatcttctatctcaaactttaatgcatgttcctgactccatcccatttggtttctttttttttttttcttttgagacagagcctcactctgttgcccaggctggagtgcagtggtgtgatctcagctcactgtaacctccacctccagagttcaagcgattctcctgcctcagtctcctgagtagctgggattgaaggcaggtgccactgcgcctggctaatttttgtactgttagtagagaaggggtttcgctatgttggccaggctggccttgaactcctgacctcaggtgatctacccacctcccaaagtgctgggataacaggcatgagctaccacatcctggcccccatttagtttatctatctctgataattgtaacagttccagtagactaagtcaattttctgattttttaatattaaaagtattggcagctaggtctgttgcacacaatgttttatacttcagatgtgatagtattgggaatgtttctttgagaattaagcatataaatatgcttatgtatcttctaaatattacttttatatatatatatatatatatatatttcattatcgatgacctgcaaaatgttacttatatgtgtatttcagattatcaacatccaagaaatagaatcatccatgcatgcactccttttaaaacaagctatgacctttatgaaacgcaggcaagatgaattaaaacatgaatcaacgtatttacaacagttatcacgttagtgtttttcgtgttccatacaatttattattcattaagctaaattatgtgaagaataaaaatatttttatttttataaacatgtttttcatgtattttcccacaaaccctttacccaccaacttccaaaaactcaaaacatttagaaataggacttaagaatgttttaaattaagtccaagactcaaaaataaacatgacttccagttatttactatttcagacagaatatgtacatagccatttagagaatgttttgagacaagttcacataattctggaggctctgtcagaagtctaacttcatagtttcagagcccttttacagattggttctggtgagtttcaatacagattttaagatctcattatataaaatacggatgcctcctcttttttttttcgcattgattttgtactttcagagatatcttcctttgattaaggtgctatcaggagatagtgaaagaccataaccaagtagctagtaaatgcaaaggcaaagtgactttcagtgaaacacacaacccttagtggatcataaataatggtattacgtattaaaataagaaataatatgaatagaatacagtaatccctctaatctgcagttttgctttccacagtttcagtcaacaatggtccaaaaatgaataagtacagtacaataagatattttgagagagagatacccaacattcgtataacttacaatatattattttcattgttctactttattgctattgttagtctcttacagtgcctaatttataaattaaactttatcataggtgtgtatatagaggaaaaaacaaatagggtttggtgctatatgcagtttcaggcatcgactggggttcttagaaggtgtcccctgcagattaggggggactcctgtattggcaaagccaatatttcttgcatttggctatggaaaaaaactggtagaaactactggaaaagaatatgagaaaacgaaactttgtggtagaactttgttgctgttctcaacaacagcaaaagtacaccagccaaagtacatttttaggctaatgaacctcatgcctgttaatattgcaataaagagttaacattgaaatgtcattgcataattaattgcaaaatttaagcatatttatgtatttacatatgcatatgtttatacatccatgatattacctttattttcaaagcattttacttttttcttttgagaatttgtagtatgaagtcaattttatttattaacaggcaaagatgagacatccacaagtggaaacttctcagtagatgaaaaaactcagtggattttagaagagattgaatctcgaaggtacctatataaagtgaagatttaaagaaagcatcattgagcaagtacttttcactactgaaatataattaaccacatgatgtcattaactatacctgatatacattattaatttgtaagaataatagaaaagcaaaatttagtaaaaccacccttgactgctttaaagacacattggtgtatttggatcagttaaaaggaatgggtaaaatgacatttatcaggctgggaattccttgtaactagaaaccggtcctaattataattaccccctcttcggaatctggttagcccatgggaatgtcctaaatgggaatgtcttataagagaaaacaaaacaaaacaaaaaatgcagaaccaccaactcaaactaatgaaactaaaaatgtcaaaaatattaataaaattgtgcgctgatatgatagtatatttctggccatttaaaataaatgataaaattacttattttcagcaagaggttaaaaaaaatttaggcatttattttcagcaagaactacttactttttgtttatttttggtttgttgcaaaatataggacaaaaagaagacaagcaagggtgctttctgggaattgtaaccatcaggaaggaacatctagtgatgatgaactgccttcagcagagatgattgacttccaaaaaagccaaggtcagttaccaagtttctaatatatcatggtttgagttttgaaatggtgagaaacactttgctgggattgcccttaataagtacataagctatataaaacagttgggtaaattcaggaaaaatgaaacacatttttcctctgtaagactcttttctctgaaaaaatggagtaaaatgaaggaaggaacattgtgagtattcttacatcttcatagttttttctcttagacgttctccaattaataatgaacatcttcatttcatttctttaccacacatactttctatattgtcatttttaacttaaaacatttgaatttggtgaaactttttagcatgatgagaagatgcatatagttgaaaaattctaggctctggatttaaataaatttgggttctaagggagatttttttctgtgtaatcttagacaaattttttgacctccctaaatttgatgttgttttgtctgtaaataagtagactatacctatatggtatggaagatagctacgatggtaaaatgagattaatgtatttctgcgtatagcaggggtatatatggtaacttctattagtgttgatattattactttgttgataaagtgatttaataaaaatttatattaatataaaaggacaaattttagctcaattgattacagtccatcatgaccgtgtttttaaggaagcatacttaaagttcacaacttaaaatgcataaagagacttattttgtttacaggtgacattttacagaaacagaagaaagtttttgaagaagtgcaagatgatttttgtaacatccagaatattttgttgaaatttcagcaatggcgagaaaagtttcctgactcctattatgaagctttcattagtttatgcataccaaagcttttaaatcccctaatacgagttcagttgattgattggaatcctcttaaggtatttatgcttaacatatgaaaaattatcctgattatattagttgcttaaattcccttactattgtgttaggcattaaataccttacccttagagtcggagctgaaatttagagctttggaacaatagtcagaaaatgtgtgctttcggctacattcttcttttcttggctgtcacttgatttttaggctaagcatcattaacatcagtaaagcaaacacatttttttttagcttcttgtacattaaatttaaaatcctcccagaaagtataaggtactgttgggtttggagaaagtagatataaaagccttgtttcaagaattcttaagttggagatgacatactgggaagagttgcttagggttgtgttgagaaggtggaatgcaagcctttgaagagtttatggggtaaacaggatgaatcagaaagggaaaggtgtttcataaaggtgtaaagggagaagtattagttcaggagctagaaattgcacagatatttagatcctaagttaaggaatataaactctgttcactgaatttgactgactaaaagaaaaaaaaagaagtatgaactcagcaactgcctactgtgtaataggacctttaactaaatcacatacaaattacatatttatgcttagtgaattgaaggggccagaaataaactttgcttgaagtggatgaattttttttataaacaaattccatggctgtttcaagtgcctaacaaatttgtattttgctccaagcagagtacttgccatgtggtagggtctaaaggctccggcacacactaggtagttgttgagtgtttgttgtgtgattgaatgcatgaaatgcagcttcttcttatgttacttagacaccatgtctcagtcatgctgtcctgcaatcctgcctagccttggtggtctagtgttaaaatagggaattaatctcttctgatccttagaaaagctctggtgattattgaaaaaaataataactatttaaaaatacactaatgttgaaagatttctttataacttttgtaattttctttgtaagttggaatccacaggtttaaaagagatgccatggttcaaatctgtagaagaatttatggatagcagtgtggaa

SEQ ID NO: 738 - DNA, 1760 bp, Homo sapiens
gtcacccacccaccccccccacatctactaggggtcacccaccctcccatccatcccatacacacctactgggtgtcatccaccctcctatccatcccatacacatctactgggtgtcatccaccctcctatccatcccacacatacctactgggtgtgccctctcccttgtggagctccagatcagtggggaaggcagatgttaacaggcacctgcacattgtaatgcttctgtgacagcagaagctgtgacagccctctttacacggcgggctgggggaggcctcccaaggtatgacttaagagatcgaagatgggaaagaggtcctggggcccaggaacaagcagagaggcagagtggggaaggcagagttccacagaaagcgggaagcaagaagaattcccgggaaggactaccagccacgcctctgtatttgggaactttttgactctccctggagtttcagcagctggactagcaacagggaagcctgctgccgctgccacagtgcccagaccctgcagagcatgtgggcaccaaaactagcctggagagtgcagatgtgcagcccacgctgggctccccgtgaaggcctggccttggccgtgttttctcccctgaatgcgggctggctctgcactgacccgtccactcctcctgggctcctggaactcctgacccaggacacttcctcccagccccagatgacacagcacacactgcgtcgcccacgagcccatgcgtgtcttctactgagctgattcccttctggtctgccatgtaattctggggctccgtccccaacccaagctcctcctcattcactgggttaatgcttttcatgcccaacagtgctttgcacacaactggtactcaataaatgtgtggctgactgacagagtggagcctatggccagggaaagaacagaaccaaccactgaatgggaacgaggggctgtcttgctatcatgaactcacgtgggaggctggttctcagaggcctgctctgtgccaggcacgccctgggcctggggacacagctgagggcagacggacctcacggctttaccactctagggcaggaaacaatctcagatggtgcttggagtggcgaatgccacacagcagaacggacatggagagcgggaggtggagcaggctgggcaggacctcagggcagagcccgagcaacaaggacccagccacgcagacccaggagtgacggcagaacaggtgacctcaggcagccctgagacttcacagtcatctcctgaggactcccaagtttgccctcctggcctgatggcctccctggagcttcgtggctctgctctgatgccctgatgccattgcccactgagctcgcccgtccttcctgctgtcccttcccttcaatggcagtgccacccttcccatcgctcaagccaggtccttgattcttctctcattcccatatacaattctgcaggaagtcttacaggttctaccttcaaaacacacccagaagccaaccgtgtccctccacccccaccgcttccacgctgggctccctgcccctgtggctgtgggtctgtcctccatccagttgccagcaaggtcctgtgaaggccccgtcagatcacagcaccacctgcccaggaccctccaggcctctctcttccacttggaataagactcaaggttcaccatggcccgccaggcttcccacggtctgcacctccaccccaaatctcgcctcttctatcacctcccgtttccc

SEQ ID NO: 739 - DNA, 11853 bp, Homo sapiens
ctctaactagggacttctggtgcctgggccacactcttcaaaggaatgattagacctaatctgtgactcccagggacatagcaggctggctgcagctcaataccaagaactttctaacgcttggagccatctttaggtgccctgggctgccctagggggaccccatgcaggctgggaagccataaggcagagggttcctgcgttagacctgcagtcgaggccacaaactcgtcttctgtgcctactagaagtggcccctgcagtgctctctgcagcagccgcacccatgggagcactgcccacgtgctgggacacaggcatgttggataaaataaggtgtgcttaccttagtctacggcactgttcctgctggcatctcagctgtacttgaactccgtggctgggtgtcaggagctccaagaaccccacaatggagggcgacttcccagaccactgggcgaggggacagagccatcctaggatcctcagatccctgtgtgagacttcgtttctttccaacctggattgttctgctaggtcttcactcgcagccttacctcataaggtctacagtggaggggcgcttctccctcttcaaaaacgtactcaccaatggcacatgcaaaattttattgtaaaacggtagccatttgcatttataaagaaagacaccgttctcagcatcctcagaaggggcagctaagctttataggaggtttcggggattctgattgaacgtaacaaataatagtataaatgaggaagatttaatatggcaaaattcacataatttagaatccagcagagagcacgtgtgggctatttggaatggacagtgaagggccaccttttgcaaaacggagtgactggcaagtgacaagttggaaatacttttctttcaaaagactggttctaacaaatgttgacagtgtggccaaaatcactcccacagctcccattgttgctaaggtgaaaacccttggagaggctgtttcaggcttatctgtggtgcctgaaggcgtcctcttacctacttgtccttcacctaaacacttcactgcccctggcagcatccgctgggaccatcctgggacagagctggctcatgctccagccacatccccagggatgccctcctgtggaacaaatgccatgcatgtgtgcttgggctcatttccagtaaagatacatcacagtctatgtaataatgatgagaacttaaaaaaaaacacacacacaaggccaacaacttagaatctgagcagtctctcataatgttaaaaatcattttaaataaagttaccacattttcaataaaacttattcatccttccttgaaacagaaacacttggaattaaaacataatttgtaaaaaatcatgagccctgcgatgagtgggctgggagctggctccttccttctgtgcgtgttcgggaggcttcacgtcctcgcccgtggtccctgggtggcctgcaggcaccagggggtggaaacaatgccagggagaattcctgtcacatcaaacaggaacattcactggattcctcttccagggaaaggagctgggggtggaagtgtggaaggactgagtgttgtttcttttccaactccaggcagtgactccggctgccaatcatgactgtcaatcatcgtagtaataatctaacttggtgaacaccgttttgcagcctttatctgagaaaactctctcctctttggggaaaaatgtcatctcctcagccactctgcttacaatgtcttcatcaatttcatagcctcgggactgcatttccactcggatacacatttttaggtgtttgtattccagggggaggaagggaacaaaataatcaatgaggttccggtcaattaagctgctgtgccagaagccacctgggaagaagaaacaaggtgctgttcatccacatccacccacctgccctatagacgcctcctgggggtcacttacctaccctcccatccgtcccacaaacgtctactgggggtcacctatccatgccacacacacctactgggggtcacccacccaccccccccacatctactaggggtcacccaccctcccatccatcccatacacacctactgggtgtcatccaccctcctatccatcccatacacatctactgggtgtcatccaccctcctatccatcccacacatacctactgggtgtgccctctcccttgtggagctccagatcagtggggaaggcagatgttaacaggcacctgcacattgtaatgcttctgtgacagcagaagctgtgacagccctctttacacggcgggctgggggaggcctcccaaggtatgacttaagagatcgaagatgggaaagaggtcctggggcccaggaacaagcagagaggcagagtggggaaggcagagttccacagaaagcgggaagcaagaagaattcccgggaaggactaccagccacgcctctgtatttgggaactttttgactctccctggagtttcagcagctggactagcaacagggaagcctgctgccgctgccacagtgcccagaccctgcagagcatgtgggcaccaaaactagcctggagagtgcagatgtgcagcccacgctgggctccccgtgaaggcctggccttggccgtgttttctcccctgaatgcgggctggctctgcactgacccgtccactcctcctgggctcctggaactcctgacccaggacacttcctcccagccccagatgacacagcacacactgcgtcgcccacgagcccatgcgtgtcttctactgagctgattcccttctggtctgccatgtaattctggggctccgtccccaacccaagctcctcctcattcactgggttaatgcttttcatgcccaacagtgctttgcacacaactggtactcaataaatgtgtggctgactgacagagtggagcctatggccagggaaagaacagaaccaaccactgaatgggaacgaggggctgtcttgctatcatgaactcacgtgggaggctggttctcagaggcctgctctgtgccaggcacgccctgggcctggggacacagctgagggcagacggacctcacggctttaccactctagggcaggaaacaatctcagatggtgcttggagtggcgaatgccacacagcagaacggacatggagagcgggaggtggagcaggctgggcaggacctcagggcagagcccgagcaacaaggacccagccacgcagacccaggagtgacggcagaacaggtgacctcaggcagccctgagacttcacagtcatctcctgaggactcccaagtttgccctcctggcctgatggcctccctggagcttcgtggctctgctctgatgccctgatgccattgcccactgagctcgcccgtccttcctgctgtcccttcccttcaatggcagtgccacccttcccatcgctcaagccaggtccttgattcttctctcattcccatatacaattctgcaggaagtcttacaggttctaccttcaaaacacacccagaagccaaccgtgtccctccacccccaccgcttccacgctgggctccctgcccctgtggctgtgggtctgtcctccatccagttgccagcaaggtcctgtgaaggccccgtcagatcacagcaccacctgcccaggaccctccaggcctctctcttccacttggaataagactcaaggttcaccatggcccgccaggcttcccacggtctgcacctccaccccaaatctcgcctcttctatcacctcccgtttccctcctctgtttatcctcaaccagtcacagggaccccaagcacaggcccccctcgggcccctggacgtgctgtccgcactggggaatgcttttccctcagacatccacatggctcactcccccgggtcagcccaaatgccaccctcacagggagccttccctgtccactctattaaagcagagcccatccttaccctgaaccccaaagcctttcttgatttttttcccctactggccccggggggaaagatatctatatgtccacatgtgtacatgtgcgatgtgtgcatatgtactgcatgtatacacacaaacacatcacacacatcaacatatctatcccccatcatctgatacattttctttctttattatcactaggatgtaggattgataagggcaagaatttctgtgtttgttcactgctgtgtcccccgtcctaggtatgatgcctggcacttaccagatgctccatatacatgtgctgaatcaatgttcagccatctgcctgaggtcacagtcagtctgtgggccagggctgcccgactcccaggttggcactcctaagcaccgtgtaacctccacagcgtggattctaggccacggggctcatctgcctcagcattaggctaaagtttccactgcatgtgctcatgttttttggcaaggcaagaaactatccaacatgttacaaaatacttgtctttcctcagtagtattccacttgcacacactgacatactgtaccccatgctgttcactaactgtaggattaatttcttggcaagtctgtttcaaatgagcccttctgttttgtcatctccagaacctgaagcgcaaagacttgaacagccagccctgcacaactcacaggtcttagccagtgagtcagcctccatcaggctggctttccacctccccaggttcaaggtcaaaggtctcatgacatttggagaagtagtgagctaaaacttaaaagctcaggttttagaatcagagataccgaacaggctgcatggccctgggcaagctgccacatctctgagtctcagtctctaccctgcgaggtatggtgaagactgagtgaaatccgcaggcaggctgtttcacacggtgcccagtacaaaataagggccgaaccgctatttggctgttgctcttgggcaatgcagagaaagggaggaactaacaggtcatctctccccctgagctgcccacggcatccttccttgctcaaccactggctctttcttctacaaagaaaatcatgtagctgaagaaaatgggggaactggccaggcgtggtggctcacgcctgtaatcccagcactttgggaagccgaggcgggtggatcacgaggtcaggagttcgagagcagcctagccaacatggtgaaacccccgtctctaaaaatacaaaaattagctgggcacagtgatgtgtgcctgtagtcccagctactcgggaggctgaggcaggagaatcgcttaaacccgggaagcggaggttgcagtgagccaagatcgcgccactgcactccagcctgggcaacagagcgagactccatctcaaaaaaaaaaaaaaaacagcaggccaggtatgtagctcatgcctataattccagcactttgggaggctgaggcgggaggatgacttaagtccaggaagtcaagaccagcctgggaaacataggaagacccagtctctaccaaaaaaaaaaaaaaaaaaaaaaaaaaaaattagccaggcatggtggcgcaagcctgtggttccacctacatgggaagctgaggctggaggatcacttgagcctaggaagtcaagactccagtgagctgagatcacaccactggactccagcctgggtgacagagtgagactctgtctcaaaaaataagctgagcacagtggctcacgcctgtaatcccagcactttgggaggccgaggtgggcggatcacctgaggtaagagttcaagaccagcctggccaacatgacaaaaccccatctctactaaaaatacaaatattagctgggcatggtgtgcacctgtaatcccagctactcaggaggctgaggcacaagaatcgcttgagcccgggaggcagaggttgcagtgaggcaaggttacgccactgcactccagcctaggtgacagagtaaaactatctgaaaaataaaaataaaacagcacttgtcaaacattagtgttcataaaagttacctggagttcatcagcaaagattcccctcatgactcggaaggggactgagaatctgcatttctttctacccagctcccaggtgatgctgacagtgaccctgatgcttttaacacttagggtgcaggattaggaaccagatgggactggcggtggatggccctactcactgttcttgttattgaaaaccgacacagacaacgcgtgttcaatgtctttgagcttgatgtcttccctctgctttccactcctccagaaatccaaagccacatctgtgatcctttctgctccagcattgctgcaaaacaatcccagtgggtaaggacagggttttctcctggagctcagaggcttgggctcggggcccatccatcatgtcctagccctgaccttacctgagaaatatgaacatggctttctggtaggagaccccatccaccaggtcataatagtcgaggaaaggcttgatggcatctatgaggcctgcatgcatcttatccatttcatcaaatatgaagatggacctcgcacaggcactcacgttgcctcgaatccacaactgtaactgatcctgaattaaaaggggaaaaagcgaacacaaagttctcagccagggccatcaatcagctccttctaccactaagaaccgcagcttcacttacagaccactgtgcactcggcactaagaactttacatgcccaaaatcttctttgttcctaccaaccccatggagtgggcactatcgttctcattttacagatgagggaactgaggcacagagagcgcttactccacttgcccaagactatatgtggcagagctgggacctgaacccagtcctgtctcactccaaagcccgatactttggttacggttcccgcactgcgagatgccacacggatgctgtcagagatgctgctcttttgtcatcaaaggggcaatgtgggatgtcatgaggatactgatttttatttaaaaagggggtggggtcgggcatggtggctcacacctgtaatcccagcactttgggaggctgaggcagacggataagttgaggtcaggggtttgagaccagcctggccaacatggtgaaaccccatctctattaaaatacaaaaattagggccaggcatggtggttcatgcctgtaatcccagcactttgggaggccaaagtgggtggatcacctgaggtcaggagttcaagaccagcctggccaacatggtgaaacctggtctctactaaaaaaaatacaaaaaaattagctgggtatggtggcaggtgcttatagtcccagctactcaggaggctgaggtagaattgcatgaacctgggaggcggaggttgcggtgagccaagatcaagccattgcactccagcgtggcgacagagcaagactccattaaaaaaaaaaatacaaaaattagccaggcatagtggcaggcgcctgtaatcccaggtacttgggaggctgaggcttgagaatcgctggaacctgggaggtggaggttgcagtgagctaagatcaccccactgcactccagcactccagcctgggagacagagcaagactccgtctcaaaaaaaaaaaataataataataataaataaataaaataaaataaaataaataaataaaataaacaaggattcactcagacctgttaggctccagcagccaaggtttctcactctggtgaccaaacttatatgcaataacagggaacatgcactgagtgttcactatgggaacaacaatattctaagcactgttcatataactttttttttttgacagtctcgctctgttacccagactggagtgcaatgacatgatctcagctcactgcaacctctgcctcccagattcaagcgattcccttgcctcagccccctgagtagctgagactacaggcacctgccaccacgcccagctaatttttgtatttttagtagagatggggtttcaccatcttggccaggctggtcttgaactcttgaccttgtgatccacccgcttcggcctcccaaagtgctgggattacaggcgcgagccaccacacctggtctgttcatagaacattttactgtgacctcccaaaacccatcacggtagttaccattgtgctccttcttttacaaatgagaaaactgaggcacagacaagtgaagtaactttgcccaaagtcacagttattgttagtgaagcctcaattctaagatgatcaacttatcctgattcgtctagaatggttcttgtttgtttgggacagggtctcactccgtcacccaggctggactgcagtggctgtctgctcactgcagcctcgacctcccaggttcaagccatccttctgcctcagccccctaagtagctgggactacaggtgcatgccaccatgcctgactaatttttttgtatttttttagtagagatggggtttcaccatgttccccaggctggtctggaactcttgagctcaagggatcagccggttttggcttcccgtagtgctagaattataggcatgagccaccacacccgtggaacattcgcattttagtacagaaccgctggacagtgggtgacccacacgctcacccagacagaagggaaaaatgtgttcacatttttccatagatacagtcagggataaataactgattgaggccaggcatggtggctcatacctgtaatttcagcactttgggaagtagagacagctggatgaccttgaggtcaggagtttgagaccagcctggccaacaaggtgaaaccctgtctctattaaaaatacaaaaattagctgggtgtggtggcaggtgcctgtaataccagctacttgggaggctgaggcagcagaatcacttgaatccgggaggcagagtttgcggtgagccgagatcaagatccagatggtgctactgcactccagcctgggtgacaagaatgaaactcagtctcaaaaataaataaataaataattgactgttttgcccatcttgcaggtctgctacaaggatctaaaaggcaacagttaacatttatttgtaacatgcaccaggtacatgttatgcacttgacagacagagctccctggattgttacaagcaacactttgtaagtcagaatctgagtctcaggtcaggcaactttcctaagactacggagctgggagagtgttaggactcaaatccagatgtgtctgctgccaaagcccaagctgctcatcagtgagttcaaccataaaagctgtttgcggctgggcaaggtggctcacgcctgtaatcctagcactctgggaggctgaggtaggcagatcacttgaggtcaggagttcgagaccagcctggccaatgtgaggaaaccccatctctactagaaatacaaaaattagccggctgtggtggcacatgcctgtagtcacagctacttgggaggctgaggcaggagaatcgcttgaaccgggaaggtggaggctgtagtgagctgagatggcgtcactgcactccagcctggacaacagagtgagaccctgactcaaagaaaaaaaaaaaaaggcagtttacaacagtaggttcaacaaacttaggactctacatgtttcctctttcacaaaatgagtgagatgtggccaggcatggtggctcacgcctgtaatcccagcacttcgggaagctgaggcaggcacatcacctgagatcaggagttcgagaccagcctggccaagttggcaaaaccccatctctactaaaaatacaaaaattagctgggcatggtggcaggaccctgtaatcccagctacccgggaggctgaggcaggataattgcttcaaccgggaggcagaggttgcagtgagctgagatcatgccattgcactccagcccgggtaagaagagtgaaactccgtctcaaaataaagaaaaaaataaaaaaatgagtgagatgtgttgatctctaagatggatttgatcatgtccacctctaaaatcccatgaccctacatactcactggaccgattttcagaacccaccacaaagctttgatggtattaactgctccacgcatctcaaactcttaacttctacacctttccaaggggaactgagacatgaaccgttttccgggctcactcatttcaacatagaactcccaaatctcatcccacaacaaagagaccccaaacccgatgacatccaggaagggattccaaacttccatccttgccttgtacaaggtgatgtttgaagcatgtggaaagtgcaatgtggccacaaacaggtggacatagtcactgttcagaccaccctcgtaaatattctctgcgatgatcttgctgacgaaatttttgccggtgcctgtccacccgtgcagggagagcgtgagaggtttcttgggctttgggttgtttatgaaaccaaacacggcatttaagatgattttctttgcaagatgctgtccaaagaggttgtcgtccagatccttctgcagtgctgggaaagacaaagccaatcaggagtggggaagaaacagcggcaaaatgtagccacatttacagcccataagaaagccagcaaagccgtctagacgccctccaagcaccttgcgaaacctcaagtactgcggtctgtaagctcctggcccagaggggacggcggtccagggagccctccctttgctggtcctgcctattctaaagccctggcccgactccttcccgaaaagccccttggtgccactgccactgccaccagtttgcacccctaacccctgtgctgctcctcccaccccaaggcagagccgggaaaggaaacagtttggtccctcctggtcggctgcggaagagtcctcaccatccttcctgtctcccgctaggctagaaaggaggcagaacccacttcggagggaggttaccactggtccacccccagcttagcgcaaagtaggccaacctgcagcctggctcctcaggtctccgacttaagtctggcacgtctgtggtcatggccgaggagccaggcctcatcctgcaggccggccgcttggcttccggggtccggcccccgcggactcagctctgcccaggcccggccctcctgggatgtgacccctaccccggcctggccctgagggccatcccccaggcccagtcccaagcccagcccccgctcctgagccccagcccccaaacttcgctccagccccagtcctagcccggccctactgccatcccccagcctccatccaccatcctcaatcccctagccccagccaaccggccctggtcttaacccagccctagtgcgatcccccagccccacccccagcccccgggccccgcatccatcccccagccccagccccagccccaacccggccctagtgccatcgcccagccccagcccccaggccccgctccagccctagtcctagcccggccctggtgccatcccccggcctccatcctccattctccatgccctggtcctagttcagccctagtgccatcgcccagccccagccccagccccagcctccagcccccgccccagcctaccctcccggctaaggctccgcttctgcccgcagcactcggcgaagaggcagtagagacgcgggtagatgtagccggtgaggacgccggccagggccagtcccaggctgatgggctccaccgcctgcaccacggacggcgccagcagcagcaggcccagcacggcccggcccagcttcatgcccggacccgcgccaccctgcttgttctcgcgccgaccgcgaaccggtgcagccgccagacccacgcttccggttcctcctctcgcggaggcca

SEQ ID NO: 740 - DNA, 397 bp, Homo sapiens
  misc_feature (395): n equals a,t,g, or c
gatcacgaggtcaggagataagaccatcctggctaacatggtgaaaccccgtttctactaaaaatacaaaaaatttgccgagtgtggtggcaggtgcctgtagtcccagctactcggcaggctgaggcaggagaatggtgtgaacctgggaggcagagcttgcagtgagccgagatcgcgccactgcactccagcctgggcaacagagcgagactccatctcaaaaaaaaaaaaaaaacagcaggccaggtatgtagctcatgcctataattccagcactttgggaggctgaggcgggaggatgacttaagtccaggaagtcaagaccagcctgggaaacataggaagacccagtctctaccaaaaaaaaaaaaaaaaaaaaaaaaaaaaattancc

SEQ ID NO: 741 - DNA, 272 bp, Homo sapiens
tagggaggctgaggcaggagaatcgcttgaacctgggaggcagaggttatagtgagccgcgatcgtgccattgcactccagcctggacagtaagagtgaaactccgtctcaaaaaaaattctagttatgctaatctgatctcagcttaattacacataatccagtattgtctcatcagtgaattgctaacacccaccctcttcacaggattaaggattagcagatttactagaaagcacaaaccctcatcaccatcaccccacccactccct

SEQ ID NO: 742 - DNA, 554 bp, Homo sapiens
cctctcctaccagcttaggcagaggacttagttactatttccaatagatgggagccaaggaaaagacaagcatctgtgatgtcatgtctcccccaaacgggtagctgcctcaccagcctccattagagacatcccccacagtaagaaataagaaataatcatgagtagaatgagaaaaaaatgcagcttcctttatctgagaaaaacaatagtagctcaatgctgtggcctaaagggctttgaaaataatgcaatttctgataaaaataaatgccattattcttgcttattgtcactgttttagtcaaataagattttagcaagcatatttcaaattgttctaaatctaagtaaattggtaattaaatgctatcattagaaagtattttaatatcaaaaaaattggaccataagaaagttagtttacccttgtattcatatatacatgtgctttgtgctaaaaattgttatcatttagtgagaacctgtgactatattaattaatttaatttaatcttcatatttctctgaccgttagagagtttgtgacttgg

SEQ ID NO: 743 - DNA, 554 bp, Homo sapiens
cctctcctaccagcttaggcagaggacttagttactatttccaatagatgggagccaaggaaaagacaagcatctgtgatgtcatgtctcccccaaacgggtagctgcctcaccagcctccattagagacatcccccagagtaagaaataagaaataatcatgagtagaatgagaaaaaaatgcagcttcctttatctgagaaaaacaatagtagctcaatgctgtggcctaaagggctttgaaaataatgcaatttctgataaaaataaatgccattattcttgcttattgtcactgttttagtcaaataagattttagcaagcatatttcaaattgttctaaatctaagtaaattggtaattaaatgctatcattagaaagtattttaatatcagaaaaattggaccataagaaagttagtttacccttgtattcatatatacatgtgctttgtgctaaaaattgttatcatttagtgagaacctgtgactatattaattaatttaatttaatcttcatatttctctgaccgttagagagtttgtgacttgg

SEQ ID NO: 744 - DNA, 554 bp, Homo sapiens; identical to SEQ ID NO: 743

SEQ ID NO: 745 - DNA, 3578 bp, Homo sapiens
gcccgggagggaggcaccgggccgcgggccaagcctaccgggggtgagtggagccgggccggagggagctgcggctggagggagggacgcctggcttcccggggcggctggtgggggctcggtcacccataggggctgggaggaggatcggcgcgtcttccgggttgctgcctttcccgggggtctgccccgctgacattctgtgcccgcctctcgccctgtctccccgtgcccatcgcaactgtcaggccctgcgggctcccgccgctgtcactcgcgcacaggttaccccgtggctccctttctcttcacttgctcatgccccagctcatgggaaacctgttttctgacctcacttcccctgctccagttctgccttgctcggattctctgaaatctgaccctttccaggggcactgtgacaagaagaagggaagaagcaaccttacccctgagcaggctcccgtcccgcccatgccctacccgtggcaggggccagggttctctgatggacggagccaactcgtccgtgtgcccttgggctactcatttttataacatggccccttttctgttcatcagcactggctgcagaaacttccttttgcaggtcccttgctacccatatgtgtgaagaaaagggggaaatgaaagccctagaacccacactgcagtgggcatgggatcatcctggaaccaggagaaacgaggttagggctaccaccttaaccgcccaggtgctggctctgcgtgaatatcttaggaaatgcaagctgaggacaggtacccatcccatcctttgctgagatttttgctagcacttccacggatttctgtcagtggtatagaaaaacttacagctggcccaatgggctctgcacaaagaggcttcccattaagagactctgctacctgggggagatggagaaagggtttgagacaagtgtccagatatgtagctagaggtaaagccttcagggaggatttgcacaggagctagagaaccagaaagatgggacgaagagggagaattagtgccctgtgtgttaaaagtggatacagagctggaattcagagaagagagctaaaatggaagtttccctttattgctttagcaagaattttcctttctcatgaaaagtctctgaaaaggaaacctcctaggctgggaatcagtccagggtgctcccatgaggccctgagccatctttggacttctgagataaaaagggaatttgtttttcctgtgcattgggcttagggttcccacctacctcttttgtcaaagacaaataggcaagaaaatagacgacttgacatctgtgattacctaccctggccttcaaggttcttgcaagtgttattgaaaggatgtaagtaagccaggatagttaccaagtttctgactgctcttggaagcctttcactgactctgactgtttggatattgaataagaatacccaaaatatgttgccaaacagaaagagattctgagtctcagattatttctctgccataaagccctatcacaacagaagtgtgacccatcctgctcttaagttgtctaaagaaaaagaagagcccactatctggtattgtacactgcaggattattaagaattaaaaaaaaataacctaaatctcttctcttgcaatcaagacccatttttttctgtttgacctatatagagatagaagggacctctgtttttattcattagtagcatcattcatcagccttcttctccagacagagaaaactacatccgacatttttaactttcccagtggctgtatttccaatccctttcttgactttgatgttttctgatgaacacacactggcttcaccatacgcttctttcaaactgaatatatttttctaatgagatctgactggtgcctgacaaataaacaggtttgttcttctgggtcatgttagcagcagttcttccccccttttccagctctggttcaaactctttctgttcctttttacttttcctgattaaacttcagctcctcacagaccaacaatttctcttacctcttaggattactttggagtcttaacacctgctttccaagttatcagtttttctaccatatttactaccagttttcattggatggtagaccaagtgcctttttattgaggcttgtcccaagtgaggtaccttttggcccagcctcatgatacaaatacgccccttggttgggacttttacctatagtaatcatttcattctaaactgatgagactgtgatttgtggcagaaaatcttctgtgtgattacatccatcttgttgagtgcaggtctatatgtatttcttcctgtatgtttccaaattgcttactttcctgtacttcatgtgcttgaaattaaatggatagcctttgaatttccaggacagttctttttttttaaatgaacttcttctaaccttcaggtatattctgtttctataatgaggtccacaaaataccagttagtggctttgctacgtagcacctgccaatttcttagttcctccaagaagcttggtgcaggctccgttgatcggaacacatcaagcttttaaagttcatcttccagcaagctcctcctatctagttttgtctattatccctgggcctgttcttcataactcccttagaaatatcactcctttcccattttcatgggcattgctgatatgaatttgttccaggtcacaatttgggtctgcagcagaaatgctttcagaacagacagcagcgctggggacaggatgggaatcaatgaatgtacagctggatggagcagagccccaggtggaaaggggaagccaggaagagcggccatggagaacagtaccaggacctctggagcacctgtgctgtgaccttgaagaggagccacagtcccttcaggagaagggtgagaactcacagagtgtgtgggaagcacagtgcatagtctcctaatatttattccaaaagtagggttaaaaatctccaaattgccatggactaaatagcataacctgtaccaggaccagcccattctttctcagccctggtcacaggtacagaataggctcctgaattcagcaaaccatgcaactgggcttctcttgtttcttcataattactccctccacatgcaaatgcataattagtgatactgaatgagggagatgaaggaagtgacagcaacctgattactgttggataacccactcagtaagatgtaatttactagatgaaaattacattcaagtactgtaaattcaaactatagctagtctaactaaaagccatctgataccctttcagaacattttgagtgatggccttctcatctacatttatgcatttgagttttaccaatgggcatagatacagaagttgtgacccttaagcctctctaaaatggggcccaggccccattgagaaagggtagatcgttattctctaatgtttcttctctctccttatcagctcagtctgctccctgggttcctgcaattccccaggaggggaacactggagactgggagatggcagctgcacttcttgcggctggatcacagg

SEQ ID NO: 746 - DNA, 390 bp, Homo sapiens
aaatccatcttaatgctgcaaggtagcactatccaatagaaatataatgcaagccatatttatagccacatttaaaaagttaaaaccaggtgaaattaattttaatatatttaacccaatatacccaaaatatcactttttaaattaaatcttctaaatcttggaacacatctctattcagaccagccacatttcgagagctcaggtgtcacctgcggctacggctcccgcaaatgggacagcagccgcaaggccaacttcagatagcaacctgacttcccctcaggcagaataagtgactcctcctcagtgctctctcaagccctttatcctatcgtgaaaactagagggtacgctccttgaggaattccagactgttgtctggagaaa

SEQ ID NO: 747 - DNA, 756 bp, Homo sapiens
ggcaagggaggcaagaaagaatgttttatctgtagcattttgtgctgatagaaaaggcagggtccagtggaagaaggaggaaatggtacataatttcttcataaaaagagtaaggccagggagaagtgactgagtagacacctgtagctaaacagaggtggtgatgagtttatggtgcctccagcttctcatggccccacttgggaaattcctccagtaacattacactcactcactccttgaccatctacctttactcctctcctcatttccctgttaccaaaactatgtgccctacccagggacttctgggcagctcttttctcagatcatttctcaccctctctcctctactaacttagcctttcatactgaatcacattttccttaaaaaacagctgctgacagaagatgctacattttgtttcagggcctggtaaccatcaaggatgtgtcactgtgcttctctcaggaggagtggcggagcctggacccctctcagacagacttttatggagaatatgtcatgcaggaaaactgtgggatagtagtctctctgagtaagcatgaccttctccagccactagaagattggactctgggaggacggagccatctgcttcagggctattggatagtgtctgtctaggactctttatgtggcagggaatctgtctatgcttccgctggagaaagaacactagggccaatcccaagagaatgagagtaaatatcattaaaaaaaaaaaagtaaaa

SEQ ID NO: 748 - DNA, 5476 bp, Homo sapiens
agatggcggcgcctgaggggtcttgggggctctaggccggccacctactggtttgcagcggagacgacgcatggggcctgcgcaataggagtacgctgcctgggaggcgtgactagaagcggaagtagttgtgggcgcctttgcaaccgcctgggacgccgccgagtggtctgtgcaggttcgcgggtcgctggcgggggtcgtgagggagtgcgccgggagcggagatatggtaagtagcgggtccagggaggggttcggcggtggaggtcggtcggttggcaacagtggggtctgtcggccgactcaggggtctgtggtgagccataaccggagtctgtggactgaacggcgggagtctatgggcagaatgatgaaccatctgggagttctatggtgagccacggtggggggctccttaatagaagtttagtggggactccgtgtggcagttccgtgggaaaccatgatcgggggttcttagggcagagggataagcgggttgtaaggagtcacattgagtggtctgtagtgagccgtgacgaggagtccgtgtccgggtatccgtggacagccgcgactgggggtgggtgcgggtgccaggtgggtctatgagataaacagggaggggtgcgtggagaaccgcgatgggaagtccgcagtgagttacgcggggtctgtgaggcgccacgatggagggtcgccatgacccattagcgagtgtggacgcagggagcgggtgtcggtgggtgcgtgatgggaagtatggagcagagtaataggatgtcagaggaagggatgggggtcagtggggactgtgatggagaggttttttgggggccccgatgtgaaatctgcaggcagagtggggatccctgctgaccacggtggagttgtaatggggggatgagccgccacggtgggggctgcttaaggatccgtaatgggggtgtcctgcaggagggagatggttcagacccagagcctccagatgccggggaggacagcaagtccgagaatggggagaatgcgcccatctactgcatctgccgcaaaccggacatcaactgcttcatgatgtgagcgcgggagagatgggcggggctgacactggcagggtggggtgaggccgatgggccgcgcccctcacatctccatcgcctgccccatcctctgcagcgggtgtgacaactgcaatgagtggttccatggggactgcatccggatcactgagaagatggccaaggccatccgggagtggtactgtcgggagtgcagaggtgagggccatggatggacagggaaggcaggtggggcttcaagggaggaggaggagccacaagggggggttatggggattagtgatacacgtctgtggtgagctggaatggggctccattgtgagtaatagaagatcccacgggaagaggcagctctgccctggacaggggtgcagagtaggtgggtgggtcagtaagggagcgaagaggaagaaagaggttttgggaccattcaagccatccagtgctcactcactttggccctactctctgccccacagagaaagaccccaagctagagattcgctatcggcacaagaagtcacgggagcgggatggcaatgagcgggacagcagtgagccccgggatgagggtggagggcgcaagaggcctgtccctgatccagacctgcagcgccgggcagggtcagggacaggggttggggccatgcttgctcggggctctgcttcgccccacaaatcctctccgcagcccttggtggccacacccagccaggtgagtggctgcataaagtgaatggatgtgtaaagtggttccgtttcagccctgcctgggtccatgatttctgttctgggccccctcctgcagcatcaccagcagcagcagcagcagatcaaacggtcagcccgcatgtgtggtgagtgtgaggcatgtcggcgcactgaggactgtggtcactgtgatttctgtcgggacatgaagaagttcgggggccccaacaagatccggcagaagtgccggctgcgccagtgccagctgcgggcccgggtgagcatggacagagctgggtagggtcaggtgtgggagagctggtgggtccatgcatggttagttaagtctaggcatggataaaccaggtgggattgggcctgactgtatcctgacaggtgggaaggggcctgtcatgtccagatgaatggggcatgacctggtatgctgggctggcagaacacccccaccaaccctgggtagacagagtggggccaggtgttttcaggtggtcatgcatgttggtacagatcaggcagggctgagcattcctggcaatgaggggtagcggggaggtgtgtctggggaggtaaggccaggccaggtgggtagggctagggcaaggccgccctccatccacctggggctgacctgggccttcctcctgccggcacaggaatcgtacaagtacttcccttcctcggtgagtccagccccccagggtggggtggggcatgcgggcagggcggtcagggccagtcctgagattctgccctgcagctctcaccagtgacgccctcagagtccctgccaaggccccgccggccactgcccacccaacagcagccacagccatcacagaagttagggcgcatccgtgaagatgagggggcagtggcgtcatcaacagtcaaggagcctcctgaggctacagccacacctgagccactctcagatgaggacctacctctggatcctgacctgtatcaggacttctgtgcaggggcctttgatgaccatggcctggtgagcagacaggagcatccactggtggaagggtggaggttacagaagcagagagtatccctaatgaggagacagagggtatggaaggctgatatgggacatgagtaggtggtggggttgtcacgagcggggcaggtgggtcagtgcatgccctgcttgcagccctggatgagcgacacagaagagtccccattcctggaccccgcgctgcggaagagggcagtgaaagtgaagcatgtgaagcgtcgggagaagaagtctgagaagaaggtgatggagagggtaaagtggatgtggaaaggcagagggtggggttgagggagaggcagaggtcagaggctgaatggggcaagagccagaaagggctagaatggagcaagggtctggggtctggggctgactttgactccaccctgacctgacttgtcttgctcaacagaaggaggagcgatacaagcggcatcggcagaagcagaagcacaaggataaatggaaacacccagagagggctgatgccaaggaccctgcgtcactgccccagtgcctggggcccggctgtgtgcgccccgcccagcccagctccaagtattgctcagatgactgtggcatgaagctggcagccaagtgagtcattcctgagaggttcaagggagtcaggaagtgcatggtagggcctgaccacagccttctgtatgtctaccagtcaatcagctatccaccagtcaccaaacagccactacccactcacccatccacctacccacccacctgcccgtgtgtccatccagccaccattccgccagtcacctatttacttctccttttgccatttgcgtctattttgccattctcacttactgatcacctcactcattctgttgcttgctaccttccctgcagccgcatctacgagatcctcccccagcgcatccagcagtggcagcagagcccttgcattgctgaagagcacggcaagaagctgctcgaacgcattcgccgagagcagcagagtgcccgcactcgccttcaggaaatggaacgccgattccatgagcttgaggccatcattctacgtgccaagcagcaggctgtgcgcgaggatgaggaggtgagcaagcaggggcgcagcagagcagggcctgtactttgtccttcccagccttattgttccttccattccatgcagagcaacgagggtgacagtgatgacacagacctgcagatcttctgtgtttcctgtgggcaccccatcaacccacgtgttgccttgcgccacatggagcgctgctacgccaaggttggggtgtcagactgagggggcggaccatgtgggaacatcagtgggccagtgggggacagatttgttgtctgggtggtgtcttgggagggcatgcagcgcacatccacagttccctccatttgtgctcatccctccagtatgagagccagacgtcctttgggtccatgtaccccacacgcattgaagggtaagtgagggtgccacgcagtgagaggtggggggttaaggcgggggtcagaagtgggatgtgtgtggagctggggcaggatacgggcaaccagccaggacagatggacctcccttccctccctctactgccctctctactccaaatccccagggccacacgactcttctgtgatgtgtataatcctcagagcaaaacatactgtaagcggctccaggtgctgtgccccgagcactcacgggaccccaaagtaaggttttccctcagctcctcccattttgcccctcctccctgcctcgctgtcccacattcatcccttccttcctcacctcacttttccttcactttttcctctcagcttccctgctgcttcaccctccattcctccttttccatgcctcctcaccgttccctgaaccctccattcttttccttctccctccttgagcccccattcctattctcccttatcaccgctattcatccccccaacctggcctccttgcaggtgccagctgacgaggtatgcgggtgcccccttgtacgtgatgtctttgagctcacgggtgacttctgccgcctgcccaagcgccagtgcaatcgccattactgctgggagaagctgcggcgtgcggaagtggacttggagcgcgtgcgtgtggtaggtttctgtgcggttttggtgctgcatgtggtaggtttccatgtcggacgtggccggggcaggcggggctgcaggtgttcctgcttaggactcctgccgctcccttggcagtggtacaagctggacgagctgtttgagcaggagcgcaatgtgcgcacagccatgacaaaccgcgcgggattgctggccctgatgctgcaccagacgatccagcacgatcccctcactaccgacctgcgctccagtgccgaccgctgagcctcctggcccggaccccttacaccctgcattccagatgggggagccgcccggtgcccgtgtgtccgttcctccactcatctgtttctccggttctccctgtgcccatccaccggttgaccgcccatctgcctttatcagagggactgtccccgtcgacatgttcagtgcctggtggggctgcggagtccactcatccttgcctcctctccctgggttttgttaataaaattttgaagaaaccaaggaa

SEQ ID NO: 749 - DNA, 5476 bp, Homo sapiens
agatggcggcgcctgaggggtcttgtggggctctaggccggccacctactggtttgcagcggagacgacgcatggggcctgcgcaataggagtacgctgcctgggaggcgtgactagaagcggaagtagttgtgggcgcctttgcaaccgcctgggacgccgccgagtggtctgtgcaggttcgcgggtcgctggcgggggtcgtgagggagtgcgccgggagcggagatatggtaagtagcgggtccagggaggggttcggcggtggaggtcggtcggttggcaacagtggggtctgtcggccgactcaggggtctgtggtgagccataaccggagtctgtggactgaacggcgggagtctatgggcagaatgatgaaccatctgggagttctatggtgagccacggtggggggctccttaatagaagtttagtggggactccgtgtggcagttccgtgggaaaccatgatcgggggttcttagggcagagggataagcgggttgtaaggagtcacattgagtggtctgtagtgagccgtgacgaggagtccgtgtccgggtatccgtggacagccgcgactgggggtgggtgcgggtgccaggtgggtctatgagataaacagggaggggtgcgtggagaaccgcgatgggaagtccgcagtgagttacgcggggtctgtgaggcgccacgatggagggtcgccatgacccattagcgagtgtggacgcagggagcgggtgtcggtgggtgcgtgatgggaagtatggagcagagtaataggatgtcagaggaagggatgggggtcagtggggactgtgatggagaggttttttgggggccccgatgtgaaatctgcaggcagagtggggatccctgctgaccacggtggagttgtaatggggggatgagccgccacggtgggggctgcttaaggatccgtaatgggggtgtcctgcaggagggagatggttcagacccagagcctccagatgccggggaggacagcaagtccgagaatggggagaatgcgcccatctactgcatctgccgcaaaccggacatcaactgcttcatgatgtgagcgcgggagagatgggcggggctgacactggcagggtggggtgaggccgatgggccgcgcccctcacatctccatcgcctgccccatcctctgcagcgggtgtgacaactgcaatgagtggttccatggggactgcatccggatcactgagaagatggccaaggccatccgggagtggtactgtcgggagtgcagaggtgagggccatggatggacagggaaggcaggtggggcttcaagggaggaggaggagccacaagggggggttatggggattagtgatacacgtctgtggtgagctggaatggggctccattgtgagtaatagaagatcccacgggaagaggcagctctgccctggacaggggtgcagagtaggtgggtgggtcagtaagggagcgaagaggaagaaagaggttttgggaccattcaagccatccagtgctcactcactttggccctactctctgccccacagagaaagaccccaagctagagattcgctatcggcacaagaagtcacgggagcgggatggcaatgagcgggacagcagtgagccccgggatgagggtggagggcgcaagaggcctgtccctgatccagacctgcagcgccgggcagggtcagggacaggggttggggccatgcttgctcggggctctgcttcgccccacaaatcctctccgcagcccttggtggccacacccagccaggtgagtggctgcataaagtgaatggatgtgtaaagtggttccgtttcagccctgcctgggtccatgatttctgttctgggccccctcctgcagcatcaccagcagcagcagcagcagatcaaacggtcagcccgcatgtgtggtgagtgtgaggcatgtcggcgcactgaggactgtggtcactgtgatttctgtcgggacatgaagaagttcgggggccccaacaagatccggcagaagtgccggctgcgccagtgccagctgcgggcccgggtgagcatggacagagctgggtagggtcaggtgtgggagagctggtgggtccatgcatggttagttaagtctaggcatggataaaccaggtgggattgggcctgactgtatcctgacaggtgggaaggggcctgtcatgtccagatgaatggggcatgacctggtatgctgggctggcagaacacccccaccaaccctgggtagacagagtggggccaggtgttttcaggtggtcatgcatgttggtacagatcaggcagggctgagcattcctggcaatgaggggtagcggggaggtgtgtctggggaggtaaggccaggccaggtgggtagggctagggcaaggccgccctccatccacctggggctgacctgggccttcctcctgccggcacaggaatcgtacaagtacttcccttcctcggtgagtccagccccccagggtggggtggggcatgcgggcagggcggtcagggccagtcctgagattctgccctgcagctctcaccagtgacgccctcagagtccctgccaaggccccgccggccactgcccacccaacagcagccacagccatcacagaagttagggcgcatccgtgaagatgagggggcagtggcgtcatcaacagtcaaggagcctcctgaggctacagccacacctgagccactctcagatgaggacctacctctggatcctgacctgtatcaggacttctgtgcaggggcctttgatgaccatggcctggtgagcagacaggagcatccactggtggaagggtggaggttacagaagcagagagtatccctaatgaggagacagagggtatggaaggctgatatgggacatgagtaggtggtggggttgtcacgagcggggcaggtgggtcagtgcatgccctgcttgcagccctggatgagcgacacagaagagtccccattcctggaccccgcgctgcggaagagggcagtgaaagtgaagcatgtgaagcgtcgggagaagaagtctgagaagaaggtgatggagagggtaaagtggatgtggaaaggcagagggtggggttgagggagaggcagaggtcagaggctgaatggggcaagagccagaaagggctagaatggagcaagggtctggggtctggggctgactttgactccaccctgacctgacttgtcttgctcaacagaaggaggagcgatacaagcggcatcggcagaagcagaagcacaaggataaatggaaacacccagagagggctgatgccaaggaccctgcgtcactgccccagtgcctggggcccggctgtgtgcgccccgcccagcccagctccaagtattgctcagatgactgtggcatgaagctggcagccaagtgagtcattcctgagaggttcaagggagtcaggaagtgcatggtagggcctgaccacagccttctgtatgtctaccagtcaatcagctatccaccagtcaccaaacagccactacccactcacccatccacctacccacccacctgcccgtgtgtccatccagccaccattccgccagtcacctatttacttctccttttgccatttgcgtctattttgccattctcacttactgatcacctcactcattctgttgcttgctaccttccctgcagccgcatctacgagatcctcccccagcgcatccagcagtggcagcagagcccttgcattgctgaagagcacggcaagaagctgctcgaacgcattcgccgagagcagcagagtgcccgcactcgccttcaggaaatggaacgccgattccatgagcttgaggccatcattctacgtgccaagcagcaggctgtgcgcgaggatgaggaggtgagcaagcaggggcgcagcagagcagggcctgtactttgtccttcccagccttattgttccttccattccatgcagagcaacgagggtgacagtgatgacacagacctgcagatcttctgtgtttcctgtgggcaccccatcaacccacgtgttgccttgcgccacatggagcgctgctacgccaaggttggggtgtcagactgagggggcggaccatgtgggaacatcagtgggccagtgggggacagatttgttgtctgggtggtgtcttgggagggcatgcagcgcacatccacagttccctccatttgtgctcatccctccagtatgagagccagacgtcctttgggtccatgtaccccacacgcattgaagggtaagtgagggtgccacgcagtgagaggtggggggttaaggcgggggtcagaagtgggatgtgtgtggagctggggcaggatacgggcaaccagccaggacagatggacctcccttccctccctctactgccctctctactccaaatccccagggccacacgactcttctgtgatgtgtataatcctcagagcaaaacatactgtaagcggctccaggtgctgtgcccgagcactcacgggaccccaaagtaaggttttccctcagctcctcccattttgcccctcctccctgcctcgctgtcccacattcatcccttccttcctcacctcacttttccttcactttttcctctcagcttccctgctgcttcaccctccattcctccttttccatgcctcctcaccgttccctgaaccctccattcttttccttctccctccttgagcccccattcctattctcccttatcaccgctattcatccccccaacctggcctccttgcaggtgccagctgacgaggtatgcgggtgcccccttgtacgtgatgtctttgagctcacgggtgacttctgccgcctgcccaagcgccagtgcaatcgccattactgctgggagaagctgcggcgtgcggaagtggacttggagcgcgtgcgtgtggtaggtttctgtgcggttttggtgctgcatgtggtaggtttccatgtcggacgtggccggggcaggcggggctgcaggtgttcctgcttaggactcctgccgctcccttggcagtggtacaagctggacgagctgtttgagcaggagcgcaatgtgcgcacagccatgacaaaccgcgcgggattgctggccctgatgctgcaccagacgatccagcacgatcccctcactaccgacctgcgctccagtgccgaccgctgagcctcctggcccggaccccttacaccctgcattccagatgggggagccgcccggtgcccgtgtgtccgttcctccactcatctgtttctccggttctccctgtgcccatccaccggttgaccgcccatctgcctttatcagagggactgtccccgtcgacatgttcagtgcctggtggggctgcggagtccactcatccttgcctcctctccctgggttttgttaataaaattttgaagaaaccaaggaa

SEQ ID NO: 750 - DNA, 128 bp, Homo sapiens
cccagctactcggaaggctgaggcaggataatcgcttgaacccgggaggcggaggttgcagtgagctgagatcgcgccattgcactccagcctgggcaacaagagtgaaactccgtctcaaaaaataa

SEQ ID NO: 751 - DNA, 5668 bp, Homo sapiens
cgcgcggtggctcatgcctataatcccagcactttgggaggccgaggcgggcggatcatgaagtcaggagatcgagaccatcctggctaacacggtgaaaccccatctctactaaaaatataaaaaattatccgggcgtggtggcgggcgcctgtagtcccagctacttgggaggctgaggcaggagaatggcatgaacccaggaggcggagcttgcagtgagctgagatcgcgccactgcactccagcctgggcgacagagcgagactccgtctcaaaaaacaaacaaaaaaaaaaaaaaaaacaaattttgaacccctgcccatcttcctggcaggcccagccccagcccaggggaccccagacgtctccagtgccttggataagctgaaggagtttggaaacacactggaggacaaggctcgggaactcatcagccgcatcaaacagagtgaactttctgccaagatgcggttagaacccttcccagggcacgggagagctggggtgtgtttttgggtggagccctggcagatggtccaagatgaacagattgaaaaaaaaacaagtcctggagaggctgacaacatccctctggtcacacagctagatctcaaggtgctcagacttcaaggacagtttccctgactcccatccaggccatattttaaaagatggtcttgggctgggcacggtggctcatgcttgcaatcccagcacttagggaggccgaggtgggctgattgcctgaggtcaggagttcgagaccagtctgaccaacatggtgaaaccttgtctctactaaaaatacaaaaaaattaggcaggcatggtggcgtgcacctgtaatcccagctagtcgggaggctgaggcaggggaattgcttgaaccaggaaggtgggagttacagtgagccaacattgtgccagcctgggtgacagaaggagactctgtctcaaaaaaaaaaaaaaaaaacaaaaaaacaagatggtcttgcccaggtatggtggctcacacctgtaattccagcactatgggaggctgagatgggaggattgcttgagcccaggagttcgagaccagcctgaccaacatggcgagatcctgtctccatttaaaaaaaaaaaaaaaaagatggttttgtgaggtaatgaaaatgaaggccccaagcttggccagacctgggtccccaggctggagtagcaccccttcctgtgtgatcttgacagagggacattactgtgagcctcagtttcctctcctataaactggtggttctacagggaagtaaaggagcaggcctacagggtgtctggtacatgtagatgctcagtatatcatgaaacccacccttgccccctttggcaagttagagagtcattcgttctttcaaaaatatttactgagcatctgctaagtgctggaaactgtttcaatgtggggaataaaacagtgaagaacgtgccgagcacggtggctcacacctgtaaccccaccactttggaaggccgaggtgggtggatcacttgaggtcaggagtgcgagaaccccgtccctaatagaaatgcaaaaaaaattagctgggcatggtggcccatgcctgtagtcccagctccttgggaggctgaggcgagaggattgcttgagcccaggagatctaggctgcagtgcgccatgtttgtgccactgcattccagcctgggtaacagaatgagaccctgtctcaacaaaaaaagaaaagaaaagagaagaaaagagaaaagaaagacagggagggagggaggaaggaagggagggagggagggaaaatagagccaggcataaacttagaaagatcgtttggaggccaggcacaatggctcacacctgtaatcccagcactttgggaggccaaggcaagcagatcacctgaggtcaggagttcgagaccagcctaacatggagaaaccctgtctctactaaaaatacaaaattagccgggcgtggtggtgcattcctgtagtcctagctactcgggagcctgaggcaggagaatcacttgaacccgggaggcggaggttgcagtgagccgagatcatgccactgcactccagcctgggcgacaaggcgagactccatgccaaaaaagaaaaaaaactcctggcgcggtggctcacacctctaatcccagcactttgggaggctgaggcgggcggatcacgaggtcaggagatcgagaccatcctggctaacatggtgaaaccccgtctctactaaaaatacaaaaaattagctgggcgtggtgcgggcgcctgtagtcctagctactcgggaggctgaggcagaagaatggcgtgaacctgggaggtgaagcttgcagtgagccgagatcgccccactgcactccagcctgggtgacagagcaagactccgtctcaaaaaaaaaaaaaaaaaaaagaataaaaaagaaatttctatattgatggaaatgttttatatctgtgctgtccaatatagtaaccacaagccacaattgtctgttgagcagtagaactgtggctattgtcactgaagaatgagattctacattttatttagttttaagtagtttacgtttctatagccacatatgactagggataccgtattaaacatcaaggatctagaaagtattttctgaaacatatcactcactcaacattacattggtagcttcactccgattttattttatgtatttgtctatttttttgagacaggttcttgctgtcatctaggttggagtacaggggtgcgatcacagctctctgcagccttcatctttctgtcacagtctcccgagtaactgaggttacaggcaccggccaccacgcctggctaattgtttgtatttttagtagagacggggtttcacagtgttggtcaggctggtcttgaactgctggtctcaggggatccacccgactctgcctcccaaagtgctgggattacaggtgtgagccaccttgcccggccgaagttatttgttttttttgagacaagttcttgctgtcacctaggttggagtacagtggtgcgatcatatctcactgcagcctccctcttcccgccacagcctcctgagtagctggcactacaggctcgtgccactatactcagctagttaaaaaactttttgctgggcgcggtggctcactcctgtaatcctaggactttgggaggccaaggcgggcggatcacgaggtcaggagtttgagaccagcctgatcaacatgctgaaaccctgtctctactaaaaaaaatacaaaaattagctgggtgtggtggtgtgtgcctgtaatcccagctactctggaggctgaggcaggagaatcgcttgaacatggtagatggaggttgcagtgagccaagatcacaccactgcactccagcctgggcacagggtgagactccgtccaaataaaaaaaaaaagtataatataaaccatatgccaatcacaaacagaaccaaagttatatgttagcattaacatttttttttagagtgaggtcttgctgtgttgcccaggctgatctcaaactcctggcctcaagtgatcctcgtgcctcagcctcctgagtagctgggactaggcatgaactactgtgcccaacatttttttgtttgtttgtttgtttttgagatggagtctcactcggtgtcccaggctggagttcagcgacacaatcgcagctcactaccacttccacctcctgggttcaagggatgggctgggtgccagctattttaggataaattttcaaagaatgtgcatggctcaaatgaagaaatctaaaatatctttctaaggtatttaaaagaaaatatgaatattagtaaaaatggtctatgcatagaacccagaaactagaaaagaacaaaatcaagcaaaagtattaatacttaggatgatggaagtaacttgggtgggtttggggcaagagctccttaaaataagagagtctgaaagacatttctggctaggtgctattttgagccaaaatctgcagtatgagaatgaatgaattacgtgaggatctgtagtgaaagatttcaggacaaatgaagggtaagtttgagagtcctggtcaggtgtgatgggtcatgcctgtaatcccagagctttgggaggctgaggcaggaggatctcttgaagccaggagttcaagaccagactagtcaacacagagaaaccccatctgtaaaagtttttttttttttttttaattagccagctgtggtggtgcatgcctgtagttgcagctactgaggaggccgaggtgggaggacctgcttgagccccagggtttgaggctgcagtgagctatgatcacaccactgcactccagcctgggtgacagagcgagaccctgtctcaaaaaaagaaaaaaagaggtaggaaagaaacaaaatattcaagggctggagagacagactgtctgataggatgcaggcaaggaaagtgaagctagggatggcagagagagaggcactatgcacgcagccttttgtaggagtttgaattttattctaagagaaatgagaaaacctgagtcacagacgggtttctaatctgctatttatttatttatttatttatttatttttgagacggagtttcactcttgttgcccaagccagagtacaatggtgcgatctctgctcaccgcaacttctgccccctgggttcaagcgattctcctgcctcagcctcccaagtagctgggattataggtgcgcaccaccacacctgggtaattttttgtatttttagtagaaacggggtttcaccatgttagccaggctggtctcaaactcctgacctcagatcatccacctgcctcggcctcccaaagtgctgggattacaggcatgagccaccgtgccaggcctggtttatgttttaaaaaagcataaatttcgagaatacgcagtacacgtatgcattaggacgctcctggaaaagtataaaattatgtttaaaagcagttataggcagggcatggtggctcatgtccataatcccagcactttgggaggctgaggcgggcagatcacctgaggtcaggagtttgagaccagccttgccaacttagtgaaatcccatctctacaaaaaatacaaaaattagctgggcctgagggcaatgcacctgtagtcccagctactggggaatctgaggtgggaggatcacttgagcccaaggtcgaggctgcagtaagtcatgattgcaccattgtactctagcctcggcgacagagccaggtcctgtctcaaaaacaaacaaacaaacaaacaaacatacatgagagcaatgggtcagcctgggcaacagaacaagactacatcttaaaaaaaaaaattggcccggcatggtggctcacgcctgtaatcccagcactttgggaggctgaggtgggcagatcatgaggtcaggacatcaagatcatcctggctaacacggtgaaactctgtctctactaaaattaactgggcatggtgcatgcgccagtaatctagctactctggaggctgaggcaggagaatcgcttgaacccgggaggtggaggttgcagtgagccaagattgcgccactgcactccggcctgggcgacagagcaagactccatctcaaaaaaaaaaaaaaaa

SEQ ID NO: 752 - DNA, 4961 bp, Homo sapiens
tctgaggaattttgtctgcggctcctcctgctacattctgagtggggaaagggactaaggtggtctgaggaccccacagagtcaggaagattgagaggtgagagtgctgaacggggaggggctttggggctaagggaagtgcccgggaccccacctgaccccaacgctcacgggacaggggcagaggagaaaaacgtgggtggacagagggaggcaggcggtcaggggaaggctcaggaggagggagatcaacatcaacctgccccgccccctccccagcctgataaaggtcctgcgggcaggacaggacctcccaaccaagccctccagcaaggattcaggttggtgctgagtgcctgggagggacacccgcctacactctgcaagaaactcaaaaagggagatgaggggatcgtgggagggaggtagggagggaggagggtgccactgatcccctgaacccctgcctctgcctccagagtgcccctccggcctcgccatgaggctcttcctgtcgctcccggtcctggtggtggttctgtcgatcgtcttggaaggtaaaagtgggatgggagaattgcggagttggagatttggaagagtgaaggtggctacaggcctggggtcccggcttagaggacctctgagagctccggggccccttctgggtcgtggttgcctcatcgtggtcgggtgggtctccaggttctcccaggctcagtcccgcaggcgccaaatctgcgcaggagagcactagcaaccgatgacgtattgaggcccacacctctgggattggctgtcctgcttcgacagccttgaaagtgggtaagctgggtggggggctctgggagaggtcagtgctgagtaaggcaattcccagcagcttgagccccaccaggtcactccagtattcctccccattctttttttttttttttttttttttctcttgagacggagtctcgctctgtcgccgaggctggagtgcagtggcgcgatctcggctcactgcaagctccgcctccctggttcacgccattctcctgcctcagcaggactacaggcgcccgccaccgcgcccggctaattttttgtattttcagtagagacagggtttcaccgtggtctcgatctcctgactttgtgatccgcctgcctcgacctcccaaagtgctgggattacaggcgtgagccaccgcgtccggccattcctccccattctaaccacatgatccccaaggatctctatccatcccggtatcccaacctaagggggttccaataacaaatttttggccgggcagggtggctcatgcctgtaatcccagcactttgggaggccgaggcgggcagatcacttgaggtcaggagttcgaaaccagcctggccaacatggtgaaacttcgtctctactaaaaatacaaaaaaattagccaggtgtggaggcacgcgcctgtaggcccagctactcgggaggctgaggcaggagaatcacttgaacccgggaggcggaggttgcagtgagccgagatcataccactgcactccagcctggctgacacagcaagactccgtctcaaaacaaaacaaaacaaaaatagctgggtgtggtggtgcacacctgtaatcccagctacttgggaggctgaggcaggagaactgcttgaacccgggaggtggtggttgcagtaggccgagatcatgccactgcactccagcttgggctacagagcaagactccatctccaaaaaaaaaaaaaaaaaaacaaattttgaacccctgcccatcttcctggcaggcccagccccagcccaggggaccccagacgtctccagtgccttggataagctgaaggagtttggaaacacactggaggacaaggctcgggaactcatcagccgcatcaaacagagtgaactttctgccaagatgcggttagaacccttcccagggcacgggagagctggggtgtgtttttgggtggagccctggcagatggtccaagatgaacagattgaaaaaaaaacaagtcctggagaggctgacaacatccctctggtcacacagctagatctcaaggtgctcagacttcaaggacagtttccctgactcccatccaggccatattttaaaagatggtcttgggctgggcacggtggctcatgcttgcaatcccagcacttagggaggccgaggtgggctgattgcctgaggtcaggagttcgagaccagtctgaccaacatggtgaaaccttgtctctactaaaaatacaaaaaaattaggcaggcatggtggcgtgcacctgtaatcccagctagtcgggaggctgaggcaggggaattgcttgaaccaggaaggtgggagttacagtgagccaacattgtgccagcctgggtgacagaaggagactctgtctcaaaaaaaaaaaaaaaaaaaaaaaaaacaagatggtcttgcccaggtatggtggctcacacctgtaattccagcactatgggaggctgagatgggaggattgcttgagcccaggagttcgagaccagcctgaccaacatggcgagatcctgtctccatttaaaaaaaaaaaaaaaaagatggttttgtgaggtaatgaaaatgaaggccccaagcttggccagacctgggtccccaggctggagtagcaccccttcctgtgtgatcttgacagaggggcattactgtgagcctcagtttcctctcctataaactggtggttctacagggaagtaaaggagcaggcctacagggtgtctggtacatgtagatgctcagtatatcatgaaacccacccttgccccctttggcaagttagagagtcattcgttctttcaaaaatatttactgagcatctgctaagtgctggaaactgtttcaatgtggggaataaaacagtgaagaacgtgccgagcacggtggctcacacctgtaaccccaccactttggaaggccgaggtgggtggatcacttgaggtcaggagtgcgagaaccccgtccctaatagaaatgcaaaaaaaattagctgggcatggtggcccatgcctgtagtcccagctccttgggaggctgaggcgagaggattgcttgagcccaggagatctaggctgcagtgcgccatgtttgtgccactgcattccagcctgggtaacagaatgagaccctgtctcaacaaaaaaagaaaagaaaagagaagaaaagagaaaagaaagacagggagggagggaggaaggaagggagggagggagggaaaatagagccaggcataaacttagaaagatcgtttggaggccaggcacaatggctcacacctgtaatcccagcactttgggaggccaaggcaagcagatcacctgaggtcaggagttcgagaccagcctaacatggagaaaccctgtctctactaaaaatacaaaattagccgggcgtggtggtgcattcctgtagtcctagctactcgggagcctgaggcaggagaatcacttgaacccgggaggcggaggttgcagtgagccgagatcatgccactgcactccagcctgggcgacaaggcgagactccatgccaaaaaagaaaaaaaactcctggcgcggtggctcacgccagtaatcccagcactgtgggaggctgagcaggcggatcacgaggtcaggagttcgagactagcctgctcaacataatgaaaccctctctgtactaaaaatacaaaaattagctgggtgtggtggcaggcacctgtagtcccagctactcgggaggctgaggcaggagaatggcttgaacctgggaggcagaggttgcagtgagccgagacagtgccattgcactccagtccaggtgacagagcgaaactccatctcaaaaaaaaaaggaaggcattggtagcaagagatggcaggccttgaaagccaggccagggtgaagtgtttcttttttttttttttttttttttctttttaaatttttttttttgagacggagtctcgctctgtcacccaggctggattgcagtggcctgatctcggctcactgcaagttccgcctcccgggttcatgccattctcctgcctcaccctcccgagtagctgggactacaggcacctgccaccacgccagctaattttttgtattcttagtagaatgtagaatttacttagtagaattttttgtattcttagccagcatggtctcgatctcctgacctggtgatccacccgcctcggcctcccaaagtgctgggattacaggcgtgagccacggcgcccggccttattttttctttttgagatgtacccagactggagtacagtggtgcgatctcggcttactggaacctccacctcccgggttcaggcaattctcctgcctcagcctcatgagtacttggaactacaggtgtgtgacaccacacatggtattttttgtatttttagtgaagatgacatttcaccatgttgcccaggttggtctcgaactcctgacctcaagtgatcagcctacctcggcctcccaaagtgttgggattacaggcgtgagccaaatgcccagccaagggtaaagtgtttagacttcaacgtgctttggtccatctgggaaactgaggcacagaagttggcccacccagcccagcggtcctcctaatcccacagacagtggggatggagattctgcaaggggaagaggtgggagtcaggtagcaggcagaatttggacagcctgggaggtagctgcacacagtgacccccttccttattcctccccacagggagtggttttcagagacatttcagaaagtgaaggagaaactcaagattgactcatgaggacctgaagggtgacatcccaggaggggcctctgaaatttcccacaccccagcgcctgtgctgaggactccctccatgtggccccaggtgccaccaataaaaatcctacagaaaattctc

SEQ ID NO: 753 - DNA, 4957 bp, Homo sapiens
tctgaggaattttgtctgcggctcctcctgctacattctgagtggggaaagggactaaggtggtctgaggaccccacagagtcaggaagattgagaggtgagagtgctgaacggggaggggctttggggctaagggaagtgcccgggaccccacctgaccccaacgctcacgggacaggggcagaggagaaaaacgtgggtggacagagggaggcaggcggtcaggggaaggctcaggaggagggagatcaacatcaacctgccccgccccctccccagcctgataaaggtcctgcgggcaggacaggacctcccaaccaagccctccagcaaggattcaggttggtgctgagtgcctgggagggacacccgcctacactctgcaagaaactcaaaaagggagatgaggggatcgtgggagggaggtagggagggaggagggtgccactgatcccctgaacccctgcctctgcctccagagtgcccctccggcctcgccatgaggctcttcctgtcgctcccggtcctggtggtggttctgtcgatcgtcttggaaggtaaaagtgggatgggagaattgcggagttggagatttggaagagtgaaggtggctacaggcctggggtcccggcttagaggacctctgagagctccggggccccttctgggtcgtggttgcctcatcgtggtcgggtgggtctccaggttctcccaggctcagtcccgcaggcgccaaatctgcgcaggagagcactagcaaccgatgacgtattgaggcccacacctctgggattggctgtcctgcttcgacagccttgaaagtgggtaagctgggtggggggctctgggagaggtcagtgctgagtaaggcaattcccagcagcttgagccccaccaggtcactccagtattcctccccattctttttttttttttttttttttctcttgagacggagtctcgctctgtcgccgaggctggagtgcagtggcgcgatctcggctcactgcaagctccgcctccctggttcacgccattctcctgcctcagcaggactacaggcgcccgccaccgcgcccggctaattttttgtattttcagtagagacagggtttcaccgtggtctcgatctcctgactttgtgatccgcctgcctcgacctcccaaagtgctgggattacaggcgtgagccaccgcgtccggccattcctccccattctaaccacatgatccccaaggatctctatccatcccggtatcccaacctaagggggttccaataacaaatttttggccgggcagggtggctcatgcctgtaatcccagcactttgggaggccgaggcgggcagatcacttgaggtcaggagttcgaaaccagcctggccaacatggtgaaacttcgtctctactaaaaatacaaaaaaattagccaggtgtggaggcacgcgcctgtaggcccagctactcgggaggctgaggcaggagaatcacttgaacccgggaggcggaggttgcagtgagccgagatcataccactgcactccagcctggctgacacagcaagactccgtctcaaaacaaaacaaaacaaaaatagctgggtgtggtggtgcacacctgtaatcccagctacttgggaggctgaggcaggagaactgcttgaacccgggaggtggtggttgcagtaggccgagatcatgccactgcactccagcttgggctacagagcaagactccatctccaaaaaaaaaaaaaaaaaaacaaattttgaacccctgcccatcttcctggcaggcccagccccagcccaggggaccccagacgtctccagtgccttggataagctgaaggagtttggaaacacactggaggacaaggctcgggaactcatcagccgcatcaaacagagtgaactttctgccaagatgcggttagaacccttcccagggcacgggagagctggggtgtgtttttgggtggagccctggcagatggtccaagatgaacagattgaaaaaaaaacaagtcctggagaggctgacaacatccctctggtcacacagctagatctcaaggtgctcagacttcaaggacagtttccctgactcccatccaggccatattttaaaagatggtcttgggctgggcacggtggctcatgcttgcaatcccagcacttagggaggccgaggtgggctgattgcctgaggtcaggagttcgagaccagtctgaccaacatggtgaaaccttgtctctactaaaaatacaaaaaaattaggcaggcatggtggcgtgcacctgtaatcccagctagtcgggaggctgaggcaggggaattgcttgaaccaggaaggtgggagttacagtgagccaacattgtgccagcctgggtgacagaaggagactctgtctcaaaaaaaaaaaaaaaaaaaaaaaaaacaagatggtcttgcccaggtatggtggctcacacctgtaattccagcactatgggaggctgagatgggaggattgcttgagcccaggagttcgagaccagcctgaccaacatggcgagatcctgtctccatttaaaaaaaaaaaaaaaaagatggttttgtgaggtaatgaaaatgaaggccccaagcttggccagacctgggtccccaggctggagtagcaccccttcctgtgtgatcttgacagaggggcattactgtgagcctcagtttcctctcctataaactggtggttctacagggaagtaaaggagcaggcctacagggtgtctggtacatgtagatgctcagtatatcatgaaacccacccttgccccctttggcaagttagagagtcattcgttctttcaaaaatatttactgagcatctgctaagtgctggaaactgtttcaatgtggggaataaaacagtgaagaacgtgccgagcacggtggctcacacctgtaaccccaccactttggaaggccgaggtgggtggatcacttgaggtcaggagtgcgagaaccccgtccctaatagaaatgcaaaaaaaattagctgggcatggtggcccatgcctgtagtcccagctccttgggaggctgaggcgagaggattgcttgagcccaggagatctaggctgcagtgcgccatgtttgtgccactgcattccagcctgggtaacagaatgagaccctgtctcaacaaaaaaagaaaagaaaagagaagaaaagagaaaagaaagacagggagggagggagctttgaagggagggagggagggaaaatagagccaggcataaacttagaaagatcgtttggaggccaggcacaatggctcacacctgtaatcccagcactttgggaggccaaggcaagcagatcacctgaggtcaggagttcgagaccagcctaacatggagaaaccctgtctctactaaaaatacaaaattagccgggcgtggtggtacattcctgtagtcctagctactcgggagcctgaggcaggagaatcacttgaacccgggaggcggaggttgcagtgagccgagatcatgccactgcactccagcctgggcgacaaggcgagactccatgccaaaaaagaaaaaaaactcctggcgcggtgctcacgccagtaatcccagcactgtgggaggctgagcaggcggatcacgaggtcaggagttcgagactagcctgctcaacataatgaaaccctctctgtactaaaaatacaaaaattagctgggtgtggtggcaggcacctgtagtcccagctactcgggaggctgaggcaggagaatggcttgaacctgggaggcagcgctcgacctgagccgagacagtgccattgcactccagtccaggtgacagagcgaaactccatctcaaaaaaaaaaggaaggcattggtagcaagagatggcaggccttgaaagccaggccagggtgaagtgtttctttttttttttttttttttttctttttaaatttttttttttgagacggagtctcgctctgtcacccaggctggattgcagtggcctgatctcggctcactgcaagttccgcctcccgggttcatgccattctcctgcctcaccctcccgagtagctgggactacaggcacctgccaccacgccagctaattttttgtattcttagtagaatgtagaatttacttagtagaattttttgtattcttagccagcatggtctcgatctcctgacctggtgatccacccgcctcggcctcccaaagtgctgggattacaggcgtgagccacggcgcccggccttattttttctttttgagatgtacccagactggagtacagtggtgcgatctcggcttactggaacctccacctcccgggttcaggcaattctcctgcctcagcctcatgagtacttggaactacaggtgtgtgacaccacacatggtattttttgtatttttagtgaagatgacatttcaccatgttgcccaggttggtctcgaactcctgacctcaagtgatcagcctacctcggcctcccaaagtgttgggattacaggcgtgagccaaatgcccagccaagggtaaagtgtttagacttcaacgtgctttggtccatctgggaaactgaggcacagaagttggcccacccagcccagcggtcctcctaatcccacagacagtggggatggagattctgcaaggggaagaggtgggagtcaggtagcaggcagaatttggacagcctgggaggtagctgcacacagtgacccccttccttattcctccccacagggagtggttttcagagacatttcagaaagtgaaggagaaactcaagattgactcatgaggacctgaagggtgacatcccaggaggggcctctgaaatttcccacaccccagcgcctgtgctgaggactccctccatgtggccccaggtgccaccaataaaaatcctacagaaaattctc

SEQ ID NO: 754 - DNA, 662 bp, Homo sapiens
tttttttttttaaattttatttatttatttatttatttatttattttttattgatcattcttgggtgtttctcacagagggggatttggcagggtcataggacaatagtggagggaaggtcagcagataaacaagtgaacaaaggtctctggttttcctaggcagaggaccctgaggccttccgcagtgtttgtgtccctgggtacttgagattagggagtggtgacgactcttaacgagcatgctgccttcaagcatctgtttaacaaagcacatcttgcaccacccttaatccatttaaccctgagtggacacagcacatgtttcagagagcacagggttgggggtaagatcacagatcaacaggatcccaaggcagaagaatttttcttagtatagaacaaaatgaaaagtctcccatgtctacttctttctacacagacacggcaaccatccgatttctcaatcttttccccaacttttcccccctttctattccacaaagccgcgattgtcatcctggccggttctcaatgagctgttgggcacacctcccagacagggtggtggccgggcagaggggctcctcacttcccagtaggggcggccgggcagaggcgcccctcacctcccggacggggtggctgccgggcggagaggct

SEQ ID NO: 755 - DNA, 138 bp, Homo sapiens
gatcacgaccctctcacgtgcacccacttagagttgtgagcccttaaaaggaacagggattgctcactcggggagctcggctcttgagacaggaatcttgcccattccccgaacgaataaaccccttccttaactcag

SEQ ID NO: 756 - DNA, 138 bp, Homo sapiens; identical to SEQ ID NO: 755

SEQ ID NO: 757 - DNA, 662 bp, Homo sapiens; identical to SEQ ID NO: 754

SEQ ID NO: 758 - DNA, 183 bp, Homo sapiens
aggaatgctgatgtcccctgccgtgcctgcgggtcaggaaagtataggaacttccagtgagctgtaagaactcagtaggactcccacatttgaaagaaacagacacagcacacaggaacttggcaaagcatcagaaaagaggagaggaaaaaagatggtaccaaaaaagtagagtttaaaaca

SEQ ID NO: 759 - DNA, 282 bp, Homo sapiens
ctcacgcctgtaatcccagcactttgggaggccgaggcgggcggatcacgaggtcaggagatcaagaccatcttggctaacatggtgaaaccccatgtctactaaaaatacaaaaaattagccgggcatggtggcgggcacctgtagtctagctactcgggaggctgaggcaggagaatggcgtgaacccgggaggtggagcttgcagtgagccaagatcgcgccaccgcagtccagcctgggtgaaacagcgagactccatcgcaaaaaaaaaaaaaaaaa

SEQ ID NO: 760 - DNA, 1845 bp, Homo sapiens
gggcgacactggcttcccttttgggatttcccagaagatccagattttcttaagtccccttggaacagactaagaaaggatcaccttagaaatcacctggtcctattgtcccccccgtacatgagtaactgaggcccacagagagcaaatcgcctgcctgagtcacacagcagtgagtggcagacctaggctaggaactaggactggggattgctattccagtgctccccatcctcacacagactgcacagtccgcctggacacaccccagctgacagtggtacctcccagtcagccaggagaatggattccttctcctgcagtaggggccccctggctgagtggcctgattgactaaaacatatgtctttgaaggagagtgcatcacaagcacctttctttggggtagatttttctctgggtctagagggacagctcaggcttgggactgggcctcagaacctacgacagaccgtgagagcagacccaccttatccatctggtgccagctccccaggtcagctacagcgacccccggacttcatagagtacaatccacagtaatagcacacagctctgtacctatctagctccatgcctatctatctgcctacctttcacaaaataattcttagcaaccctgctacagccaatgattctaatacgttctgttctattgcatgttataaaatgctggtcacgatccactaaattgatgtctctacctgctaatggtttaatacctgcagattgaaatatactggagaaataaagagagtgggagtagggacactttctcccagtgcccacaccgcccctcgttacccgcataggtcaactgaaagatacagagagggaagctttgatggggggttcagagttcaaaggaagaaatgatggcacctgcactccctgcccccagaggcaggacacagccagccctcctgtgacagcactcctggcagctccttgttggcctgcagccctcagggggcttagttgccattgactcacccactcctaaggccaccacatcaaaatctgaggcttactgccctgtcccacctgcctctgtctttcttaaaacagctaaatgcaacaatagcagaaattagcttgtttttgaggttggcaatgaccagttcaaggtgactcttattttcttaagcagtgcttgcaggacataaatgtgatgacacttgccctcctttctttatcgcctgggacagactttacaaacagacctgggagaagtcccctaaggggctgcatttatccccatctccctaggggtgatcagcattgtgacagctgggcagagcagtggtgaactgcacccatgtccctgctcacatctcctaagatctcagaattgcctgaggttctagcgtgggctccttctctccagatgatgccatccccacccccctcatttccacacagcatctgaggcatcctgcactaaaagatatatgtacagcaaaacaaaaatagaaaaccagcacagcagagtggaggtggggtataaatatacccagatccccgctgatttggttactcggggtgagcatcagatggaaatagaagtttccgggggccaagagagaaagagggatgtaacgacaattcttttcaaaacgtgtcccatggtatgcctcgtggaaaaaatggttcgttggtcaaatgaatttgggaaaatgctgtcaatatcaccgactcatggagcttcgcaaggcatcttagcttaataaaggttatgaaaagtcttgcagcaaagatgctgtttacccctgcttaatccagcactgcccaaactcattccaaataccagagcctctgtttgca

SEQ ID NO: 761 - DNA, 1846 bp, Homo sapiens
gggcgacactggcttcccttttgggatttcccagaagatccagattttcttaagtccccttggaacagactaagaaaggatcaccttagaaatcacctggtcctattgtccccccccgtacatgagtaactgaggcccacagagagcaaatcgcctgcctgagtcacacagcagtgagtggcagacctaggctaggaactaggactggggattgctattccagtgctccccatcctcacacagactgcacagtccgcctggacacaccccagctgacagtggtacctcccagtcagccaggagaatggattccttctcctgcagtaggggccccctggctgagtggcctgattgactaaaacatatgtctttgaaggagagtgcatcacaagcacctttctttggggtagatttttctctgggtctagagggacagctcaggcttgggactgggcctcagaacctacgacagaccgtgagagcagacccaccttatccatctggtgccagctccccaggtcagctacagcgacccccggacttcatagagtacaatccacagtaatagcacacagctctgtacctatctagctccatgcctatctatctgcctacctttcacaaaataattcttagcaaccctgctacagccaatgattctaatacgttctgttctattgcatgttataaaatgctggtcacgatccactaaattgatgtctctacctgctaatggtttaatacctgcagattgaaatatactggagaaataaagagagtgggagtagggacactttctcccagtgcccacaccgcccctcgttacccgcataggtcaactgaaagatacagagagggaagctttgatggggggttcagagttcaaaggaagaaatgatggcacctgcactccctgcccccagaggcaggacacagccagccctcctgtgacagcactcctggcagctccttgttggcctgcagccctcagggggcttagttgccattgactcacccactcctaaggccaccacatcaaaatctgaggcttactgccctgtcccacctgcctctgtctttcttaaaacagctaaatgcaacaatagcagaaattagcttgtttttgaggttggcaatgaccagttcaaggtgactcttattttcttaagcagtgcttgcaggacataaatgtgatgacacttgccctcctttctttatcgcctgggacagactttacaaacagacctgggagaagtcccctaaggggctgcatttatccccatctccctaggggtgatcagcattgtgacagctgggcagagcagtggtgaactgcacccatgtccctgctcacatctcctaagatctcagaattgcctgaggttctagcgtgggctccttctctccagatgatgccatccccacccccctcatttccacacagcatctgaggcatcctgcactaaaagatatatgtacagcaaaacaaaaatagaaaaccagcacagcagagtggaggtggggtataaatatacccagatccccgctgatttggttactcggggtgagcatcagatggaaatagaagtttccgggggccaagagagaaagagggatgtaacgacaattcttttcaaaacgtgtcccatggtatgcctcgtggaaaaaatggttcattggtcaaatgaatttgggaaaatgctgtcaatatcaccgactcatggagcttcgcaaggcatcttagcttaataaaggttatgaaaagtcttgcagcaaagatgctgtttacccctgcttaatccagcactgcccaaactcattccaaataccagagcctctgtttgca

SEQ ID NO: 762 - DNA, 1660 bp, Homo sapiens
gagacaagagcccagcctgcttgttgctagccaaagtgttctttccttccagcttggcctgctcttaaaagcaaagctcctgcagtgtacatcctggcattgtgtggctacctgggttttaaaccagaatcagaagtcccggatcagagggcactgctgaggttcagcctcttctcttcttggccaggaggcagcagctctgaatgggcccctgaggctgcacaggggcctttgtcactggggcgcatgcttacaaacagtgcagttcttgggaccgaggtaagcagggctgggtctcatggcagaaaggccaggatctggggctctaggaatttgggaattgggcagagtggccaagaaagctggcaggcatatcctatgggacatcacacctggcaccattgtcattgttggtgcctgtgtcccaagtagctagtgataagctgaggctgcagcaagaaacacccttcccaggtgggggagtttggaccagaggtgccctctgcccaccacacctgcaacccagaagcccagatggaacgcagctgacgaaggtgatgcttgaggctcacttttggggccccacagctggagccggtataatgactgggacaacatcaaggggtggatgaggggcctctcctcccgcaacactgccttcccatgctgttcccctgccagctccttaacactgccgaccaaggccagccctggcattcagggaaattggagggcagcacccgtagggtggccagcctcaggccccaccccagctgtgtcctctagtctctggggacccctggggggaagaagtctaccctgcttgtgagtcccgtctcagtgtggaggaactggctgcacgtgggacctgaaggtgccctctgtgtttatgttgggggtgggggggcagtgctggctgcctctgtcctgtgtgtgaccctgccctcgaagggtcctgtcctgtcagtcccgagggagccacaaccaaagctgcggagagaaggtggggaagggtgcagaatggccgtggggcacagcgtggcagactgttcagtctctgctgggtctttcctagggacctggaaggccagtgttgcttccccctcactccctttcactgcaggcagcctctctgcttccccaatgccttatgcctgggcacactgccacagaatatgcaatatgtgtgggtgaccatgccctcacgaccacacccccaccccgggcagcccccggactccaaaggtcgtggctgccacagcctccctcagctcttcctgcctatctgtcttcacactgagaatggcgcccaataaatgctatccacggagaccaggctcaggctccagctgcctctgtcatcgtatgcccttgctgctgccagggaggggccatctcccaccccctcccctgccggggtctacaaacatatctagctgctgggtgccgtggctcacacctatagtcacagcactaggcgggcagatcacctgaggtcagaagttcaagaccagcctggccaacatggtaaaaccccgtctctactaaaaatacaaaaattagctgagcgtggtggcgcatgtctgtagtcccagctactcggctactcaggaggctgacgcacgagaatcgcttgaacccgggaggcggaggttgcagt

SEQ ID NO: 763 - DNA, 1427 bp, Homo sapiens
tcttttatatatagttaattttttgccagttacaacgtccatagaaccccaagatttagaatgtatcatttatatttcctctaaaaggtagtaagatatttcttctgctgttttgtgaagccactcttctacagtatctgtagccttatagcaaattaattggttgtactaaaaattttagagactgcataggtctcccttttctatcctaattacctgcaatagcctagagacgctgagcatgattacattagcaacttgactgtttaaaaaatttgttatacttgataatgaccagactgtgtgctggagtcatttgtttccttcttttctgctccccgaatacactatttaatttggttacttttatttttaaactatatggcacccttttaaataaacattcattgctaattaaaatctgccaataaattggtctcagcatttaaataccatatattttataactcatactgtggctatcaaacagaagttaacacagtaggggtaaagatatacataatgtgtacctataggtgtatttataatgcctgtgtgcagtatacagacataattacaaaatactgcattttattaatgtttattttaatattgagaattggcattcttgtaaattgaactgacaattgcttctattcagtacactttattttgagcagatatttccgaaaagagaaaaaatcactgttgacatgctttttaaaactgttttcacctgtattttgtctttcaaaaagaaaagtgatctaagttggcattgtaaagaaattgttagcaaagaatatttttttttattttttcttttggtagaaagtcatgttaatagtacaacaaagaatcaaagaataaaacataatgtttaagaacattatttataagtagtcattgtctttgtgctttaaatgtttcccttttaccttagagttattttttaaaagttgaaagtactttaaaaatttgtttaaatgagtacccattgacaattatcatttaatagtgcagttaagttcagcgaaaaatttcaatatctcaaaaaaattagagaaaaatattggtaaatgtatttgattcacaaatgtattcatagccgattgtgagctgctctaccacattttcctgtttttattgtttctgtgaagcttgattagactaacttgcttaaggtctctttcccctcaaggattctgtgattctaatgtaacaaggtacacacgctctctctgaccacttaaagtatcagagttcaaatctgttacaatcactccatttccttttggaaagttgtgcctctcataaagctgcttggacattttaagtgttttgtaatatgcattgaagtgttgagttttgtttgctgtaagaggcatttcactatgttgattaaacttatcttttctcccaaaaaa

SEQ ID NO: 764 - DNA, 1427 bp, Homo sapiens
tcttttatatatagttaattttttgccagttacaacgtccatagaaccccaagatttagaatgtatcatttatatttcctctaaaaggtagtaagatatttcttctgctgttttgtgaagccactcttctacagtatctgtagccttatagcaaattaattggttgtactaaaaattttagagactgcataggtctcccttttctatcctaattacctgcaatagcctagagacgctgagcatgattacattagcaacttgactgtttaaaaaatttgttatacttgataatgaccagactgtgtgctggagtcatttgtttccttcttttctgctccccgaatacactatttaatttggttacttttatttttaaactatatggcacccttttaaataaacattcattgctaattaaaatctgccaataaattggtctcagcatttaaataccatatattttataactcatactgtggctatcaaacagaagttaacacagtaggggtaaagatatacataatgtgtacctataggtgtatttataatgcctgtgtgcagtatacagacataattacaaaatactgcattttattaatgtttattttaatattgagaattggcattcttgtaaattgaactgacaattgcttctattcagtacactttattttgagcagatatttccgaaaagagaaaaaatcactgttgacatgctttttaaaactgttttcacctgtattttgtctttcaaaaagaaaagtgatctaagttggcattgtaaagaaattgttagcaaagaatatttttttttattttttcttttggtagaaagtcatgttaatagtacaacaaagaatcaaagaataaaacataatgtttaagaacattatttataagtagtcattgtctttgtgctttaaatgtttcccttttaccttagagttattttttaaaagttgaaagtactttaaaaattggtttaaatgagtacccattgacaattatcatttaatagtgcagttaagttcagcgaaaaatttcaatatctcaaaaaaattagagaaaaatattggtaaatgtatttgattcacaaatgtattcatagccgattgtgagctgctctaccacattttcctgtttttattgtttctgtgaagcttgattagactaacttgcttaaggtctctttcccctcaaggattctgtgattctaatgtaacaaggtacacacgctctctctgaccacttaaagtatcagagttcaaatctgttacaatcactccatttccttttggaaagttgtgcctctcataaagctgcttggacattttaagtgttttgtaatatgcattgaagtgttgagttttgtttgctgtaagaggcatttcactatgttgattaaacttatcttttctcccaaaaaa

SEQ ID NO: 765 - DNA, 258 bp, Homo sapiens
taacttagcttctctaacacctaaaaaaattcttctttgtattttcagctaatagaagacagttcttcttcatcttgacacctagagccctctatgtgattcacagaggacttaaaatacttcttactctgttgaagtgtttaattgtacagaatatatgtactctacagtatatgtgaatcagcactcaaagcagagaagtgataacatcccaagcttcccccatacttctactgacatgccctcagtctttaagaa

SEQ ID NO: 766 - DNA, 257 bp, Homo sapiens
taacttagcttctctaacacctaaaaaattcttctttgtattttcagctaatagaagacagttcttcttcatcttgacacctagagccctctatgtgattcacagaggacttaaaatacttcttactctgttgaagtgtttaattgtacagaatatatgtactctacagtatatgtgaatcagcactcaaagcagagaagtgataacatcccaagcttcccccatacttctactgacatgccctcagtctttaagaa

SEQ ID NO: 767 - DNA, 1457 bp, Homo sapiens
gtgaattgaaaaagcaaagctaatgaaaatgggttactacatcaaaaatatcttaaagagtttgctatttccatggaccagatatgatgaaattattccctgggtttaaaactgggcactcgaggaggaggtacctgaagtcatttgaaggcaagtttccaatgatgctacaatggcctgaaaaaatttctttaccctctgttatatttaacttgctggtaggaggaatagtggaatgcaggtgttaagccctttgtggtgaaaaagaggttctatagacagaaacaaaacccaccttacatcagctgattggttgattttactagtgtacctcttcatctacttgaattctatttggtaaatccatgtctttactggatatacagttaggtgggaagaggagataaaggatgacaaactctcaaacaatatttatacatttatttactccagggtcaaatccaatccttggaagtagcttctctagtttattttatttgtcccagagctctactcacacttaggacccacccaaaaattctcaaaaacgtaatatggattctgcctcatctgatgctatttctggcagtgggttgtcagccatactctgcttcattccactgggtgtccttgctagatggggagtgagatgtggagcagggaggagctttggattctgggagtggaggtggcaagggaaaagtctcctagtctcctgtgatgttcctgcctccagatagaatagcaaaaacaaacaatttttttttgtgtattatgcctccatgacattgttacattctatgaggagcatctgtctcctttctagacttgaactgtggtagaaaaagcccccttctctcttctatctacttagatttggtgatgctaggaatgtagtgttttagatattaattctatttttatttattcatttttacatcaccaataggatctgaggtggagatggcgggtattatcactggcattttacaggtgagaaagcccaaagccactgaggtaattaatggaataattgattttgaacttgggtctgtctgatttcatgtgcaagattatatacttagtgattttgattttaagtttattcttaacattttaaaccagactattaactcttacctttataaccacagatacaaagaactgtatcatttattttctgaatataaaatattaatggtcaatataaaaatacaaaaatagagaactatatacaacagaaaagcaaaattacccactaataacattttgatttatatccctttagacactgtttagagtttatacatatatgtaaatatgcttgtattttaacaaaattgagatattatataaactgtttgtagcagggtgtttaaaattttaacaatatgttatggatatctttctgtgtcaataaatgtgtatttacattagagttccaagcatttgaactg

SEQ ID NO: 768 - DNA, 1457 bp, Homo sapiens; identical to SEQ ID NO: 767

SEQ ID NO: 769 - DNA, 1457 bp, Homo sapiens; identical to SEQ ID NO: 767

SEQ ID NO: 770 - DNA, 866 bp, Homo sapiens
gaaagattaaacagatgatgagaatttctaaaaagattagcaaggtcatttcttcagtcagaaaactttaaaaaatatttattaaataaaatcaatttttaggaagttttctgtagtcatttactaaacatatgatttcactagaaaagctgatcataagtgaatttatacctacctgtgtggtactctgaaacacactgaaagctctgttgcaattaggattttgatgtgacaataatattgttgtataatttcgagatttgtaggaaggtctcattcttccaagctgagagtctagcactcattttctataacagatatggcagcttagaggtgttggctttgtttggatgtaatttagggtactaaatttaaatttaaagatattgttcaaacaatatcatatcatcacattgagctgatataaattctgtgggtccgataatatctttgtgataatttaagagctaaccagttaccacacatctatgatataaccctaacacacacagaaaagcatacatgcaaaaagaaatgactaattagggtacatttataattgcatctaggtaatttttaccctaatgtcttcataaagtacttgagtgtaatgtttgttacctccaacagaactaaatgttctatggttatgaaagaatatatttatttaaagcattgcttttattttgaaaagcttcttaattaatttgattaacaaatatgctaatttggggaaacctagagaagataattgttgaaattttgcaaatataaacatctcctatagcttctgtgttatttctgacttcttaacactattatgtttatgttgcacattactgaaagagtaaagatatgaaaaaaac

SEQ ID NO: 771 - DNA, 866 bp, Homo sapiens; identical to SEQ ID NO: 770

SEQ ID NO: 772 - DNA, 866 bp, Homo sapiens; identical to SEQ ID NO: 770

SEQ ID NO: 773 - DNA, 12438 bp, Homo sapiens
  misc_feature (6531): n equals a,t,g, or c
tgatttttgtatttttagtggagacagggtttcaccatgttggtcttgaactactgacctcaggtgatgcacctgcctcggcctcccaaaatgctgagattgcaagcgtgagccactgcacccagccatttctgtgggttgtctttgtattctattgatagtgtcctctgatgcacagaaggtttccattttgatggagtccagttcacctttctgcagtgtcacaccctccttgtttgatgctcctcttttcccttgacttccttgcccgggttcctggtgtttctccttcctcgctggctgcctgtcctcaggtcttctttgctggatcctttaaccgcctgggattccgtaaagtgccattttcctaagggctggtaccaaccctcgccatctgcaggtgcagacctgaaggagcgggaacagatgagtgaagcagaggtgggggtgtttgtccagcgactccggggcctgatgaatgacatcggtgaggatctgggtgtggggtggaggagggggtttgggggtccctgccgatgacagtcccgctacccccaccagcatctaaggagagtcttctttctgtttggagttctgtgataagacagatgactcacccagggggatggaggaggatgaccgagggcagttctctcagagagggagttctggctcttcagcttttgtgtcccgccccaccctcagggttcaagcctggccattccaaagcagttaagtttccccaagcatgctttcaagttttgacaattgctgttacctttgcctgagataccccttcttggttacttgaacttttacttgtccttcaagccctccagtacctcctcctccaggaagccttcccaacccaccctctgagctttttattggagcactgatgatcctgggtcaataatgcctgatacacatttgtcttccccatgagactgagccccatgggaacaaaggctatgtctgattcattctgtgttcccagttcccagcacccagcacagggcttggcacaaagaaagggaggccccagggaggccagcggattaggcctgaacagggatcatccagcccatcctcccattcctcttccctggctgattctgtaactttccctaaagggaaaattggcttctgagataacctggctgcgggaagcagaggttgtcgtgagcagagattgtgccattgcactccagcctgggcaacaacagcgagactccatctcaaaaaaaaaaaaaaagaaaaaaggaaaaaaaagaggccgggcgcagtggctcattcctgtaatcccagcagtttgggaggctgaggcgggcggatcacgaggtcaggagttcaagaccagtctggccaacatggtgaaacccccgtctctacttaaaaaaaaaaaaaaaaaaatacaaaaaaattagctgggcgtggtggcgcacatctgtaatcccagctactcaggaggttgaggcaagagaatcacttgaacctgggaggcagaggttgcagtgagccaagatcatgccactgcactccagcctgggtgacagaacaagactccgtctcaaaaaaaaaaaaaaaaaagaattaagataacctggctgaggttccatgtaatgtccccagacctgggtccactgaggcctctgtcccaaccagcttgcccctccccagccttgagtctctgtcctggtcccaccagggctttgcaggctgagcctttcttcctctccacagcagccttccctgcacccaccattgcggctatggatgggtttgccttgggcggaggcctagagcttgccctggcctgtgacctccgagtggcaggtactgggccaggactgggggcagggggtggggctagggagtcaggggtgagtgaaacagggtgagtctggacattctgcagtcagccactgttcttggcttccaaccaaaagcaaaactaaggcaaggcagagcacagagggtgctcaggcagaagctgcttcccctcctggtgcagccattagctgctgtagtatctgtgacctgtcagaacctgcttccttcattttgggaatatttgaccaacctcagagcaattgctgttacgagccaaggaggtcaaagagcaatgtccagtcttcccattctgtccaagtcagatttatcgaccatgtttcggaaaaaggtgagcctcagggatagtttgtcaatggctgagctaatcacaaaggtgcctgggcaggaatactggcaccagccaaatttgcattacttgttctgagcaattgagctttgtttgaagaatgggaggggataaagaagataactgatcattttctcaggtgactgacctggtgaattaggagcagccttcttggatgcagttaggcaaagtctgaatgtcttcccttctccccccccgctctctcctgccaccccaggagcaacatataaaaatgtgtagctccaggcatgaaagtagcttctgtctacacaatgcaggtcaaagagaaggaactgaccaggtgtccaggcaccaaaataccaggctggtctagccccaactctccttctcacatgcccacgttcacgcaactaactcacagggttttggggaagactaagacggagtgaatgtaaaacccactcccttctgcccacgttcacatggtccatgctgagggaattcagaaaaggagacagacccgggggggtgcgtcagtcaaggcaagtttctcgaaggaaggaagcagaactcaggaggacatggactggaacagtcagggcaatttcaggctgtgacaaagctggaacggacgactgtagcaggagcaggagtcactgacattctaggccaggccagggctaagccagagaacctattaatagtaatccacaaatagatatggggcacctcctaggaactctccttgttccaagcgtcgtacctcgtgtgatccttagcggctctctgaagcagacagaagagggccagccatctttcttccacctttgaggcttgggaagggtgagacttgctggtgacttacaactccatcaaaggggcatggtgaaataagggcctgggctcctgacttctgggctagggctcttccaaaggcagagtctggagaggcctggctgtggccagaccatggggcaagtggctagaggggcgagtagacagcagaggcagctgtggcccccgggattagcactgggggaccggatgggggagggaggcctcactttgttctatctgagcagcttcctcggcagtcatgggactgattgagaccacgcgagggctcctcccgggggcaggtaatcgcaactacagcacccgcccaattccaccccatccagggtccttcgctgctttccttttttgccctctgttctgggctctgccctcccacctgaaccctgctcctctgagaagtcttggctgagtcccaggctgagccttctctgggttcccacttcccatgctgattcccaccctgctccctccatcctggtaggagggactcagaggctgccccgttgtctgggggtggccctggcgaaggagctcatcttcacgggccgacgactgagtggaactgaggcccacgtactggggctggtgaatcacgctgtggcccagaacgaggagggggacgccgcctaccagcgggcacgagcactggcccaggagatcctgccccaggtgtggtgacagctcggcaccagaaggagggctggagtcatgggggaggcatgtgtggggcagggtgtccccttgggctgcacatccattctcccagagacatatgattaaccctctttggagtttgtttaaccatccagtaaacacaatcaagtcaaattttaattctgaattaaaatgtaaattgaattccaaagggctggaaccaaatgggcttgaaagccctctgaatgtaacactgtccagtagaccattctgagatgagataaatgttctatacttgtgcttatccagtatgggagccactagccaaatgatttaaattgcagaaaatgaatgcagttcctcattcacactagccacatttcaaatgctaatagccacatgtggcttgtggctactatactatatagcacagccttaaaatcccccaaagactgaaaaagcaagattctaaaatagatacagaacttccaacccatatttcctaccatactgcctggtgggatattcttgaaatacaacatgtgggctgggcagggtggctcatgcctgtaatcccagcactttgggaggctgaggcgggtgtatcacgaggttaggagttcaagaccaccctggccaatatggtgaaaccccgtctctactaaaaatacaaaaattagctgggtgtggaggcacgcacctgtaatcccagctactcaggaggctgaggcaggagaatcgcttgaacctgggaggcggaggttgcagtgagccaagatcgcgccattgcactccactgggcgacaggacgagactttatcttaaaaaaaaaaaaaagaaggaaagaagaaatccccctcccggacatgtattaagcatttttttctttgaagagatagggtctcgctgtgtcatccaggctggagtgcagtggtgcaatcatggctcactgcagttttaaactcctgggctcaagtgatcctcccgcctcagcctcccaaagtgttagaattacaagcatgaaccaccgtgacgggccaggctcatgttttagccagatgtggtagttcgagcctgtaatcccagttatttgggaaaaagcattgcttgaacccatgaattcaaagctgcagtaagctggtcacgccactgcacttccagcctgggcaacaaagcaaaatcccgttgctaaaaacaaacaaacaaaaacaaaaagccaaaaaaaacaaccaaaaaacccctcattaaaaaaatcctcaaatagcatgggaaagggtgagggataaaagactacacgttgggtacggtgcaccaaaatcttagaaatcaccactaaagaacgtatccatgtaaccaaaagccacctgttccctaaaatctattgaaagaaaaaaattaaaaatcctcaaacaataacctctcagcatggtaccccaaagggtaccatgctcagtagggagcaggtcaggccctgcccaggtacaaccctaccagctgcagggcccaaagccctcagcagggatatctgggatctggctgtctggggtatccaaggccctgcgagggtctgctggcttctcccaactctcagggggcccaggatacagggggttgggtacaggagatcccaaatttccataaagattaaaagtggcttaaatggagctaagttagactaatttataataaatttgtcttagcctataatgctaggtaccttaatgtagtatctcagctcttagaataatccagttgaactgattatccccattttatctgtgagaaaacccataaaagttcagtgacttgttcatcaaggtcacaaagagtgattgtagtattagaaaaaaaaacaacaccggtattttggcatttattttgcacaatacagaatgcaatataaaaaaggtattttaagagagcaaaatatgtacaaaattttaaaaacaaactaaatatttaatgtatttcaaatacaaaaatttacaaatgtcacaaaacaaagttaaccatacatcattttaatattgacatatattgaattaatcatataaaagtaaccattttggcttagcatggtggctcacgcctgtaatcccagcactttgggaggctgaggtgggaagactgcttgagaccaggggttctagaccaggctgggcaacatagtgagacctcatttgtattaaaacagaaaagaagccgggtgcagtggctcattgctgtaatcccagcactttggaggtaaagacaggaggatcacttgatgccaggagtttgagaccagcctggccaacatgcaaaaccctgtctttactaaaattacaaaatttagctgggcatggtggctcatgccttttattacagctactcaggaggctgaggcacgagaatcacttgagtctgggaggtggaggttgcagtgagccgagatcgcaccactgcactccagcccaagtgacagagcaagattctgttaataaaataaaatagtataattttgaacaaaaatcctttctttcctgtctctcaaatgtaaataatcctaatacttcttaaaacagatcttctttaatttggaggtgagggactatagctttttgaaagcatttgtcttttttttttttaagcttcatcatatataaatgaagagtctgatgctattgcctagacaatattaatgctgtcaagtttctattatacttggttagaaagtctccgaactaatacagaactctgggtcactcaatggagtggctgattgcagctttcatatctagacctgtagactatagggtttgtctttttgccttaactaaataacaatcacaaataanttcagatttccaaatatactaaaatattggtactatataattactgatattttcagtacttaaaagtagctttgtataccaaaacaccagtctaccaaaaacaagtactggcatgagtaatcccagagttgagaccttctgggtcaacctgaaaaacaaaacttcaacttccacctatgttactgggtgctcagaataaaggtttccggataggagagggccagggatggtgtagatggccaccatctagtggacaaaccactctgatagggtagcaaatggttccagagttttctcagcccagaaaaaaactgtcaatatccacagtttgcatcagatttccttcttaaatagtaaatacacattacactttgagaaatggattcagctgtgttttttttcttttctttttagagacaggatcttgctctgttgcccaggctggagtgcagtggcacgatcatagctcaccacagccttgaagccctgggcctgagcagtccttccacctcagcctctgaatagctgggactacaggtgcaagctactgacttggctagaatttggctgttttcactcacaaacatacgtacataccgtttttaactttaataaaaggttactttatttatttatttatttatttatttatttatttttgagacagggtctggctcttttgcccaggctggagtgcagtggcatgatcacagctcactggagcattgacctctcaggcccaagtgatccttccacctaagactactgagtagctgagactacaggtgcaagtcaccacgcccagctaattttttattttttgtagagatgggatctcatgatgatgcccaggctggtctcaaactctttgggcaagcaatcctcctgcctcagcctctcaaagccctgtgattacaggcgtgagccactgcacctggccaagattacttcctttattgggtagttacctaaataataacacatatggcaagcaaatctaaaagaacagaggagtaagaagggcataaggtaaaaatcaaaggcaagatgaccagctagtcctggtttacctgtgactaccccagttttaaaagtggaagtcccatatcccagtaacccttcagtcacaagcaaacccaaacagcccttcatttcccaatccctctctctccccagatcatcactattgtttccatactcttccagaaatttccattgcatatggaaggacgtgtattatgcacatatgcttacatatttaaataaattccttttaatggcttagaggacaagaaatatctttcgaggctaatctgtttctaacaaattttaaaaacaaaatttaaatatgcatagtaaggaattcaaacatggaagaatataaaacaaaaccttcattttatataacaaaacatttataaaccttcgtttataaaacaaaacaaaggtttggttttgttttataaaggcacaccagcattttgccagtttttgccaaattgctctcctgtggcatactcttttacttttctatcaataatgtatgtaaatactggtttccccagtctcggcagtagtaggcatattgatattttagtatttgctggtctgaggtgaaagggcacagtacctcactgttttgatttgcctttcaagcgtgtagcagctgctggacatccttcacgttcgtacttcttttccggtggaccttttacatactcttttgtaaatggtttaaaagttactttatactaacttttttgtaaatcaaggaaattcatctgtcataagcattgcaattctttttcccagttttttttttttttgagacttttcctgagaaagttttataaacacttcaaataatatgatataggaagtaattcctccttgcctggaagtggggctgagactggagtgctagggctggtgtggaaccaaggccagtgacaaagcagacactgttgcttctatgtggctgtattaaaatgcacccgcccctctgcactgccccacagaccaggatttcaacacagccctgtcgacttgaaagcccaagttcctaaccctgactttgtttcactctgctggggtaaaaccttaccgcagaggctggcatttgctgaaatgaggtcgaggaagtgggaaaggtggttgggagtccaatccaagtctcaccaatgattggataaacacagccaagtgcttcacctccctgcactgcaatctcacagctgtaaaatcacagctgggtcatcagtgatgacaccagcctagaagtgtgggtagcaccattagatgagtctgtgggggaggaaagcactttgtaaactagttatgttgtgcatgttggaaggatgggctgaataacaagaaacccaggtgttcagggatcagagtctggcttctttcatgatagaaaaagaacctcagctaacaggttataggactaacgctaaagaaactgtcagcagaatggctggaaccagacccagacatctgcctccctcctttaaaacaaagctgtgcacctcagacctgcaactatcagccttgatgccctcctcaaccaagactttttgcttttccctaggcccccattgccgtgcggctgggcaaagtagccattgaccgaggaacggaggtgagagggttttgggttgggacttgggtccactaaagttggtcgcggctgggacacagtgctttcagagctcagacagcacagctgggaaaaactcaggaagtggactcttctaacagacttgaactctgacctcgtgctctacgtcagtttacacatctgcaaattggccagacagtattattgtttacattctatcctcatctttctcccttggagagaggatgagattgaggttaagaaagggtaaatgatttgcccaaggtctcagaggaagtgagtagaaagaacccgggtctgtgtggctgccagtccatgctgcaagatttgtgctggcagtaatgtggcctcagggcagggcttggggtgatgccttgggtgtggctaatccatctgtccacctcaactctcccatctagttaatccatctgtccacctcaactctcccatctagtcactcatcacacactgaatccagaacaaagctgggaactgggatacagatggatgagttaaacatggtcactgcccccgggagggggcagatacagacacaaatcaaggataatggtaccacgctgacaccccagaaaggttagagctttgcggtccattatgatatccatgtgtggcttttaaattaaaagtaaaatgtggtcaggcgcggtggctcatgcctgtagtcccagcactttgggaggctgaggcgggcgatcacgaggtcaggagatcgagaccatcctggctaacacagtgaaaccccgtctctactaaaaatacaaaaaattagccaggcgtggtggcaggcacctgtagtcccagctactcaggaggctgaggcaggcgaatcgcttgaacccaggaggcggagtttgcagtgagccgagatcgcaccactgcactccagcctgggcgacagagcgagactccgtctcaaaataaataaataaataaataaaataaatgttcagtttctccttcacgctaatcacagttcacgtgcttgacattcacatgcggctagtggctaccatactgggcagtgctcggttaaagactgttttctacagttggactgtgggaaggataaaaattccagaggaaaagtatgggcaaaggcacagaggaggataagcaagcagctcgtccagatgagagtgagggaagaagagagagtgcaagttcgaggcactaggctgtctgggttcaaagacctgctcttccacatactgttgtgaactttgacaaattatttcacctttctatgcctcaggtttctcagctgtagaatagggatactaacccttgctgtgaaaattaagttcacacacacatggtacttctcttagaatgaggctttcaagtgccagtcagtgggccctagaggctggagcaattgccagggcccaggtcataaaggttcagaaattaacgggtgacaggaagcgtggtgaggcagccggatgggaaggagaactcctcttctctggcaaaatgtctcagtctgtctcgtttctcccagcagttttgtcatagttacgaatggtgtttcttctctaggagggaaattccttctcatagctatctctgctcatatagatgtctgtaggcaatagggtgggctggcttccagtgtgggtgaagatggacaaggtcagaccaatccagggagcacgtctttcttgcaggtggacattgcatctgggatggccattgaagggatgtgctatgcccaggtatgtagcaaccagcccatgcctgcttgttaacataggctgggccaggctagagggactttgtatggtacatgaccaattttagaaggttcttctcaacacaaacagtctgaccgcatccatcgtccctcataagtcacctggagtggcttgaggagagccatagtgcttctctctgggacttttccctcaaccatctaatgtactggggttcatcctgcccacttaatgccgagaatcacagaacacaggtccttaagaggaagaaccacatcttttgcctctgtatcagatgccactgtaaagttcaggatggagttgggaggtcaagggcttggttgtagcctgcaggctgtgttcaatgtaggggctgtacacttgggactgacctattaaatctcttactcatgggtgagtaaaaaatgctaatctccacgttaacagatatccaaaatactcctaaggggtcctgggacttggagaaactagtgtgaacctggattcaaagccagatttcttactgcaaagaatttttttctctactgagcagcctcatgtcagaccactgcagacggcagctgagttctcaggaggcatgaaagcagtgtgcaagtggaggctaatgctgatggggcacagagaatacaaaggctggcctgtcttccccaggagacaaagcagccacggaggcttatacctttgcatgcctcaagatcagagtccagagacaatggaaacacttggaccctggccttgtcttgggctggacaagcttaagcaactctttttgggcctgtggccctgctcccccaaaactaatattttgtaccttgttgcagaatattccaacccgggaccggctagagggcatggcagccttcagggagaagcggactcccaaatttgttggcaaatgacccccattttaaccttcagcatgggagatgcatgccctgaagagcaggatccagaaggaagatttgtggccagattgccttcatcatttcacctctccagacttccatttcttcacaaggatgatgatggaaataaaatgactggcgtgatgcctggaaccaaggtgctgatcctaccacctactgctaccttccttagcttcaccctggctagaaataatcacgagggttgggtttgctttggaaaatgcctgtctctctacttgaatgataaagaattaaattagatctctctgagtcttggtatcattggctctcagcccctgacctctctcagttatcaggcactcattagagatgtcagaagattttaagatacccctagtttcttcctgtgaacaacagaggtaataaataaactctgacatcggttgaacatgtgtcaggggtcagactgcagatcccagtctctgccagttacttgctgtataaccgtggacaaattgtttaaatgctctgggcctcagcttcctcacctacaaaacaaaacttgtgaagatttagcaaaataaaaacacttcatattcaataaatatgttttaattgttaa

SEQ ID NO: 774 - DNA, 3323 bp, Homo sapiens
ttccctaggcccccattgccgtgcggctgggcaaagtagccattgaccgaggaacggaggtgagagggttttgggttgggacttgggtccactaaagttggtcgcggctgggacacagtgctttcagagctcagacagcacagctgggaaaaactcaggaagtggactcttctaacagacttgaactctgacctcgtgctctacgtcagtttacacatctgcaaattggccagacagtattattgtttacattctatcctcatctttctcccttggagagaggatgagattgaggttaagaaagggtaaatgatttgcccaaggtctcagaggaagtgagtagaaagaacccgggtctgtgtggctgccagtccatgctgcaagatttgtgctggcagtaatgtggcctcagggcagggcttggggtgatgccttgggtgtggctaatccatctgtccacctcaactctcccatctagttaatccatctgtccacctcaactctcccatctagtcactcatcacacactgaatccagaacaaagctgggaactgggatacagatggatgagttaaacatggtcactgcccccgggagggggcagatacagacacaaatcaaggataatggtaccacgctgacaccccagaaaggttagagctttgcggtccattatgatatccatgtgtggcttttaaattaaaagtaaaatgtggtcaggcgcggtggctcatgcctgtagtcccagcactttgggaggctgaggcgggcgatcacgaggtcaggagatcgagaccatcctggctaacacagtgaaaccccgtctctactaaaaatacaaaaaattagccaggcatggtggcaggcacctgtagtcccagctactcaggaggctgaggcaggcgaatcgcttgaacccaggaggcggagtttgcagtgagccgagatcgcaccactgcactccagcctgggcgacagagcgagactccgtctcaaaataaataaataaataaataaaataaaatgttcagtttctccttcacgctaatcacagttcacgtgcttgacattcacatgcggctagtggctaccatactgggcagtgctcggttaaagactgttttctacagttggactgtgggaaggataaaaattccagaggaaaagtatgggcaaaggcacagaggaggataagcaagcagctcgtccagatgagagtgagggaagaagagagagtgcaagttcgaggcactaggctgtctgggttcaaagacctgctcttccacatactgttgtgaactttgacaaattatttcacctttctatgcctcaggtttctcagctgtagaatagggatactaacccttgctgtgaaaattaagttcacacacacatggtacttctcttagaatgaggctttcaagtgccagtcagtgggccctagaggctggagcaattgccagggcccaggtcataaaggttcagaaattaacgggtgacaggaagcgtggtgaggcagccggatgggaaggagaactcctcttctctggcaaaatgtctcagtctgtctcgtttctcccagcagttttgtcatagttacgaatggtgtttcttctctaggagggaaattccttctcatagctatctctgctcatatagatgtctgtaggcaatagggtgggctggcttccagtgtgggtgaagatggacaaggtcagaccaatccagggagcacgtctttcttgcaggtggacattgcatctgggatggccattgaagggatgtgctatgcccaggtatgtagcaaccagcccatgcctgcttgttaacataggctgggccaggctagagggactttgtatggtacatgaccaattttagaaggttcttctcaacacaaacagtctgaccgcatccatcgtccctcataagtcacctggagtggcttgaggagagccatagtgcttctctctgggacttttccctcaaccatctaatgtactggggttcatcctgcccacttaatgccgagaatcacagaacacaggtccttaagaggaagaaccacatcttttgcctctgtatcggatgccactgtaaagttcaggatggagttgggaggtcaagggcttggttgtagcctgcaggctgtgttcaatgtaggggctgtacacttgggactgacctattaaatctcttactcatgggtgagtaaaaaatgctaatctccacgttaacagatatccaaaatactcctaaggggtcctgggacttggagaaactagtgtgaacctggattcaaagccagatttcttactgcaaagaatttttttctctactgagcagcctcatgtcagaccactgcagacggcagctgagttctcaggaggcatgaaagcagtgtgcaagtggaggctaatgctgatggggcacagagaatacaaaggctggcctgtcttccccaggagacaaagcagccacggaggcttatacctttgcatgcctcaagatcagagtccagagacaatggaaacacttggaccctggccttgtcttgggctggacaagcttaagcaactctttttgggcctgtggccctgctcccccaaaactaatattttgtaccttgttgcagaatattccaacccgggaccggctagagggcatggcagccttcagggagaagcggactcccaaatttgttggcaaatgacccccattttaaccttcagcatgggagatgcatgccctgaagagcaggatccagaaggaagatttgtggccagattgccttcatcatttcacctctccagacttccatttcttcacaaggatgatgatggaaataaaatgactggcgtgatgcctggaaccaaggtgctgatcctaccacctactgctaccttccttagcttcaccctggctagaaataatcacgagggttgggtttgctttggaaaatgcctgtctctctacttgaatgataaagaattaaattagatctctctgagtcttggtatcattggctctcagcccctgacctctctcagttatcaggcactcattagagatgtcagaagattttaagatacccctagtttcttcctgtgaacaacagaggtaataaataaactctgacatcggttgaacatgtgtcaggggtcagactgcagatcccagtctctgccagttacttgctgtataaccgtggacaaattgtttaaatgctctgggcctcagcttcctcacctacaaaacaaaacttgtgaagatttagcaaaataaaaacacttcatattcaataaatatgttttaattgttaa

SEQ ID NO: 775 - DNA, 28974 bp, Homo sapiens
  misc_feature (7409): n equals a,t,g, or c
tgcatggagctgccatctcctatgataacaatcgggaatacctactgaaggacctgcctgaggctgtgttacactgaacttttttcttttctttttttttttttttttaataagtaggagtacacacggcccaggccaggtacagtggctcacctggctcactcttgtaatcccagcacgttgagagggtgaggcaggcagattgcttgagcccaggagtttgagaccagcctgggaaacatagtgaaaccccttctctacaaaaaaatacaaaaattatccaggcatggttgtgcatacctgtagcccctgctactcaggaggctgaggtgggaggatggcttgagccggggaggtcaaggctgtccaatatcaaggattcctgatatttgcaagtgagcccaaaggtgtttaacccatgagtgagccatgatcgtgttactgtactccagcctgggcaacagagtaagaccctgtctcaaaaaaattaaaaataaaaagtaggagtatattctaaaataatggtaaaaataatattgtaaatatataaacctaaaacatagtcttttattatcattatcaagtattatgttgtgggcctaattgtatgtgctgtgcttttgtataactggtaaagcaagctagtttacaccagcctcaccaccagcatttgagtgttgcattgcgctatgatgttatgacagctatggtgtcactaggcaataggaatttttcagctccattagagtctgatgggacttatatgtcttatatgtggtctgtagctgaccaactaaaacatcatcatgctgtgcatgactgtaattaatggctgtccttcaactccttagctgggcactaaggttctccaccacaagctgacctttccatcctccctcctctacccatgggctcatttgaaggtgtgttacctctgtgttttgctctagctgtgccctgacttggctcctcttccttcctttctgcttatggaaatctttttggaactcccctgctctgctgctccgtcccccacactgtccttttatgtttcgtgtgtctgaacttgtctctcttctaggctgttagctctttaagagtcaggattgccagctgggtccagctgttatttgagcaaatcctccttgtttccgggcgtcagtttcctcttctgtatagtaaagtgttgttaaatcagttgttctccacactacccttcagtggtttctttttttttttttttctttgagatggtctcactctgttgcccaggccggagtgcagtggcgtgatctcggcccactgcagcctctgcctcttggtttcaagcgattctttgccccagcctcccaagtagctgggattataggtgtgtgccaccacgcctggctaatttttgtctttttagtaaagacggggtttcaccatgttggtcaggctggtgttgaactcctgactcaggtgatccacccgcctcggcctcccaaagtgctgggattacaggcgtgagccaccacgcctggcccttctagtggtttctgttgacttctacccacaacacctcgcctgtgacccaagccatctggacagaagtgatcctaggtcagctgctcagtggtatggtaggtttggtaagagtgggaagggtgcagcacagccccatccccgctgttggggtcagaagggcaatgttcccagcatcggggctagactaagaacacagggaccttggctgattactgtccatttctccaggacctggcatgtggtagtgcaaattaaatgttgcacaattgaatgtcggcagccaaagacaccctgcctggctcctggggggctcccagcttaaagttcagatactgtattaggtccgagacttgccctagtatctgggcgttttacacaaactctggttagacacttaaatgcattatctcttttaatcctaacaataacctttttattatttctcttacagatcaggaaattgaaggccagaagggtaaagtggtttgcccaaggccatggggctggtgtgtggctgagttgtggcttgagctaagggcttgtaagagttgacagtcagtattccgagagggagatgtaggtggagacaggagatgaagctgaaagatgagagacagtcagccagagagaatggaaggaaagaacaggaaagcagagagaggagtgtctgccagtcccaggataccacggctatatcagctttctattactacctaacaaatgatcacaaactttgatactcaaagtcacacacatttatcattttttagtttctgtacgtcagaagtcaaggcacaacttagcagagttctctgcttcaggtcttgccaggctgggctgcagtcgggagttggccagggctgtggtctcatcccaggcttgacgggaaagatctgcttccaaggtcgtcaggttgctgagacctgaattcacctcctatggttgttggactgaagtcctgttctcttgctgattgttggccgggggtcactctcagcaattagaggttgcccgcagtcctttgctacttgaccctctcgttaggcccatgagtgtctctaataagacagagccttttatatactataaccgaattacagaagtcacattaccttcaccatataacttaacctaatctcaggagtaacattgtataacctttgctgtatactattgcttagaagcaattcacaggtcccacccacatgcaagggaggggattattcaggatgtaaacatgagggccactctggggaccttggatctagactgctctgaagtttgtgggggtcagggtccttgactcctcctgatctggcatctctctatccactgcagtctcccttctccagagttgccccattttctctcctggagcactggagctggaagcgaccttatggccatctgcacacctctctggagcctccagacctgctgggctctaagagctctttgcaggtttctggggaggctaaggaagtccagtttgcctgaatgttacagttctttgcccctagccatagttctgtaattcctggctgaacaccctgtcccttgagagcccagaaactttcattggcctttctgtgtctctgatcagcttaaactgagaatgccaacttcataaacactgcttgtttacagacaaagctgaggaccctgggagataataataaggggtctttgaaggccaaaggattgggaaacactcctctgggcacctgctggatttcagccctgggaagacctgaaatgtccatcctgatttttcgtaggaggagaaacagcctagaagggatgataagggtgtgagctccttcccagagcccatctctcttccccacaccctgactagatggcgggggtgaattggggccagagtgggtgcaagagtcagattgggggggccttatggtcggtattaaggagttgaactttattttgaggaaaagaagggggaaggggagggacgtggtcggattggggtaagaaagatgactgtgacccaaatgtgggaacgaatgtgtgtgtgctgggagggagcaagactgaggactcgagggccaggtgggtgatccgagggatgcaggaaagagcctatgccagattaatggctgtgagaagcggtgtgagctgagaggcctgagatctctttaagaggttggattagcaggccttagtgactgagtgcattttgtaggtgaggtaagagcgaggtgacaggatcaacttctgagttgatagcaaggtcattggctcatcaatggagcaggacataccagttgagatatcaagtaggcatttggctattcaggcctggggtgcacaggagagctctgggctcctgggcacacacgggagccctgggtgtacaggaggcaggcgtgtgttagctgtggaagggaggtccctcctgcctcagcttatcctgctctccctctgcctgaactcctccagttctggaaggcaccctgcagtcccacacctgggccctcttctctgccactccctctgcctgcaacaggcttctctcctggactgcccccttccctgcaccttgccaacatgcatgcacacacacaggcactcatgcacacgctcacatatgcacccatgcatgcacacttacatgcacacatgcactcttacatcttttgcctggccaattcctactctcctgtcagctctcagcttaaaggccactgcctcctctgataactcattgctgaccttctatactagggctcccctctgcccactggaggccccttacttgtttgtcctttttctccaagttctcctcacaaatagtaattatttaatgtctgtcttccccactaggctgtaggttccatgaggacaggccttgagtctgtcctggtctctggaatcacggtgtctagtagaggccagcacacagcaaatatataaatgtacaaatgagtgaatgaagagaatctgattggccttaaggaacttacgcacttaaaataattgggcagaagagaagcagtgaaggagtgcagaggcatcacctgaaaggtaggaggaaggagaatgggggcctgccaaagccaaggcagatacgtgtcattatgcatctgtgtaaacccacagagtgtacaccaccaagagcgaaccccagtgtacactagggcccccgggtggcgacagtgcatcagtgtaggttcgtcagttgcaacacgtgcctctggtgggggatggggattgcggaaggggctgtgcctgtgtagggccagggagtataggtgaactgtattgaattgtattttccactccattttgctgtgaccctaaaactgctctaagaaaatcatctatttataaacaaataaatattcttctaagaagccaaagcagaaaacgatcaagtggagtgtgttaatgtcagcaaaggtttttgctgccacgaggttgaggcaaggagagaaacgtgtcccttggttagtgatgtggctatattcatcactttaatgagaataatgtctgctgagtgatggggctggaacctagattggagaaggtttgagcgaatggaaggtaagaaagtgactaaatgagtatagaaaactaccaagaagcttggctgttgctggtgaaagaatattacacaagtagggccaggattactgtcttgccaaacaggacagaacactaagcctctgtatttagttgctaatttattgtgacagaggagcatattgatctgtccccgtgattgtgcagttagcaaaacccaggctttgagaaaccctgtaggtcaaataccccaggctcctccacagataatctctgagggaaagacagagttgtggggagcatgtgggggttgtaccaggatttaaaagatacacggcaattttagaaattagcaagtctaaactatgatacctaaggatgcacacctgggtgataaaattataaagaaatggccgggtgtggtggctcacacctgtaatcccagcacttttagaggccgaggtgggtggatcacctgaggtcaggagttcgagacaagcctgaccaacatggagaaacctcatctctactaaaaatacaaaattagccgggcgtggtggcacatgctgtaatcccagctactccggaggctgaggcaggagaatcgcttgaacctgggaggcggaggttgtggtgagccaaggtaacaagagtgaaactctgtctcaaaaaaaaaaattataaagaaatacacagaggtgattactataagtcaaagagttacttgttcagggggaaggagggagctacgattgagtcagggcatgtggtggggtttctgaggtggccggcacagttctatttcttgatttgggtggtggttataagggtatttgccttatcataactcctcaaactctagaggaagaagtctgctgtgaagaaaagattaaggccgcggtggctcaaacctgtaatcccagcactttgggaggccgaggcgggcagattgctcgagctcaggagtttgagaccaggctgggcaagatggcaaaacctcgttcctacaaaaagcacaaaaattagccaggtgtaatggcgcatgcttatagtcccagctattttgggggttgagggaggagaattgcttgagcccaggaggttgaggctacagtgagccatgtttacaccactgtacaccagcctgggtgacagagttgagaccctgtctaaaaaaaaaaaaaaaacagcaaaactctcccccgccaaaaataaaaaaaaaaaagatgaatatggagggagttgtaaaattaaagaaggtacatgggtgcatgtgtgcttgtgtgtgtgtgtgtctgtctgtctaacaacagcagaagcaggcaagggctactgtggtagtcactgttgttcctctccccattttgcttcacagtttacaagtccttccactttctctctgaggcagaaagagcaagggtttttctctccattttatggttgggaaaattgaggcctgcctgagtgtgtgacttgtggcaagtcactctggtcatctagggcagaggctccccagatcccaggcctcctgcctccagtccccagcccgcagcccaggattaggcagagccagctgctttcccgtggctgccctgactccttacagggatcactgagattctgatgaacagaccttctgcccgcaatgccttggggaatgtcttcgtcagtgaggtaagaaagggcgggcgccagggtgggctggggatgggctggcactatctaactgggtgtcctctgtagctgctggaaactctggcccagctgcgggaggaccggcaagtgcgtgtcctgctcttcagaagtggagtgaagggcgtgttctgtgcaggtaggttctctctcctgcccccatctgtgctctgcagggtgcccaccagcctccaggggttgggggaaaccttagatcagcttcagcatgggactcattgttgccattttaccgatgtgaatgcagagactcagggaggaaaattcccttgcctaggatcacatagctagtaaggggtaggatagactttagtttgaacttggcctctctaacccttagatcttagttatttcggctatgccatgctttgttctgacccttcacgggggaaataagaaaatggagtccaagacgggtacagtggctcacatctgtaattccagcactttgggaggctggggcgggtagatcacttgaggcccgagttcgagaccagcctggccaacatggtgaaaccccttctctactaaaaaatacaaaaattagctgggtatggtggcaggcacctgtagtcccagctactcaggaggctgaggcaggagaattgcttgaacccgggaggcggagnttgcagtgagctgagattgcagctctagaattcctgggctagttcctgcccctctcggagcttcagtttccgcatctctcacagaagggctggaactgatcaaagatttccaaaggctctcccagctctgacttcctgtagtctaggactggaagagtctatttactctctactcctgctcacccctgcatctggcctttgaggaccccaccacggtcactcttcccgccaaggcgcttgcccacctgcatgccaccgtatcttgtgctcacttccgttctcgtttacttgacctttgacctctcagccttcttggaccttgctgactctgcctgtaaaaattagtcaagttttaattttcttattacttacatattttagaaattgtgggctgggtgcagtggctcacgcctgtaatcccagcactttgggaggccgaggtgtgtggatcacctgaggtcaggagttcgagaccatcctgaccaatatggtgaaaccgcgtctctactaaaaatacaaaaattagccaggcattgtggccagtgcctgtaatcccagctactcaggaggctgagacaggagaattgcttgaacccgggaggtggaggttacagtgagctgagatcacgccactgcactcccagcctgggtgacagagcacaactccatctcaaagtatttgtattatattttgaagaaaatggaaacgaaattgtggtgaaatataagtaacacaagatttaccgttttaaccatttttaagtgtacaattcagagtggcattaagtacattcacaatattgtgcaatgtcaccgctatccattcccagaacttctttatcataccaaacaaactcagcctgttcagacagtgactcccattcccccttcccctccagcctgggtaacctctatggtactttgtctctatgtatttatctattctaaatacctcataccagtagaatcatatcatatttgttttttggtgcctggcttattttacttaacatgtcctcaaggttcctccaagttgtggcaagtgtcagaactccattcctttttatggagtaacattctattgtaatgagtagcattctattgtatatataccacattttgtttacccaatcatctgttgatagatacttgggttgttttcacttttggccactgtgaagaatgtccccaaatacattggtgtacaagtaccgtcagccctctgcatctgcaggttccgcacccacagactcaaccaaccgcagattgaaaatgttaacaacaaaaataacaatgcaacaacaaaaaataatatagataaaaacaacacagtacaacagtttacatagtatttacattgtattaggtattgtaagtaatctagagacaatttagagcaagcttgtccattgtccaaccctcggcctctgggccgcatgtggcccaggatggctttgaatgtggcccaacacaaatttgtaaactttcttaagacattataagatttttttgtgtggtgtttttttttttttttttaagctcatcagttaccgttggtgttagtgtattttatgtgtagcccaagacgattcttccagtgtggcccaggaaagccaaaagattggaacccctggcttagagtatacaggaggatatatgagcataggtcatattgcaaatactacaatattttatacaaggggcttgagcatccatggatttttgtatctgaggggtcctggaaccagtcccctacggataaggagggactgtatctgtttgagtccttgctttcaactcttttgggtatatacttgggactagaattgtatggtaattctgtttaactttttggaactggtttccacagcagctgcatgggtttacactcccaccagcaatgcaccagggttccatgtctccacatccatgccaactttttgttttgtttgttttaaaagccattctaatagacgtgaggtagtatctcattgtggtttttgatttgcatttgtctaatgacgatgagattgagcaacttttcaagtgcttattgaccatctgtgtatctcctcaggagaaatgtctattcaagtcctttttcctttttttttttttttttttttttttgagactctgtcacccaggatggagcgcagtggcacaatcttggctcactgtaacctctgcctcctgggctcacgcgattctcctgcctcagcctcaacctccctagtagctgggattacaggtgcccaccaacacacctggctaattcttgtatttttagtagagacactgtttcaccacgttggccaggctggtcttgaactcgtgacctcaggtgatgtgcccacctcggcctcccaaagtgctgggattacaggtgtgagccactgcgcctggccctttgcccatttctgaattgggttgttttgttgtttagttggagaagttctttatatatcctagatattaaacctttatcagatatatgatttacacatattttcttccattctgtgtgttgtcttttcttttttttcttttttcttctttgaaacggagtcttgctcgtcaccgaggctggagtgcagttggtgcgatctcagctcactgcagccttcacctcctgggttcaggtgattctcctgcctccgccacctgagtagctgggattataggtgtccgccaccacacctggctgatttttgtatttttagtggagacagggtttcaccatgttggtcttgaactactgacctcaggtgatgcacctgcctcggcctcccaaaatgctgagattgcaagcgtgagccactgcacccagccatttctgtgggttgtctttgtattctattgatagtgtcctctgatgcacagaaggtttccattttgatggagtccagttcacctttctgcagtgtcacaccctccttgtttgatgctcctcttttcccttgacttccttgcccgggttcctggtgtttctccttcctcgctggctgcctgtcctcaggtcttctttgctggatcctttaaccgcctgggattccgtaaagtgccattttcctaagggctggtaccaaccctcgccatctgcaggtgcagacctgaaggagcgggaacagatgagtgaagcagaggtgggggtgtttgtccagcgactccggggcctgatgaatgacatcggtgaggatctgggtgtggggtggaggagggggtttgggggtccctgccgatgacagtcccgctacccccaccagcatctaaggagagtcttctttctgtttggagttctgtgataagacagatgactcacccagggggatggaggaggatgaccgagggcagttctctcagagagggagttctggctcttcagcttttgtgtcccgccccaccctcagggttcaagcctggccattccaaagcagttaagtttccccaagcatgctttcaagttttgacaattgctgttacctttgcctgagataccccttcttggttacttgaacttttacttgtccttcaagccctccagtacctcctcctccaggaagccttcccaacccaccctctgagctttttattggagcactgatgatcctgggtcaataatgcctgatacacatttgtcttccccatgagactgagccccatgggaacaaaggctatgtctgattcattctgtgttcccagttcccagcacccagcacagggcttggcacaaagaaagggaggccccagggaggccagcggattaggcctgaacagggatcatccagcccatcctcccattcctcttccctggctgattctgtaactttccctaaagggaaaattggcttctgagataacctggctgcgggaagcagaggttgtcgtgagcagagattgtgccattgcactccagcctgggcaacaacagcgagactccatctcaaaaaaaaaaaaaaagaaaaaaggaaaaaaaagaggccgggcgcagtggctcattcctgtaatcccagcagtttgggaggctgaggcgggcggatcacgaggtcaggagttcaagaccagtctggccaacatggtgaaacccccgtctctacttaaaaaaaaaaaaaaaaaaatacaaaaaaattagctgggcgtggtggcgcacatctgtaatcccagctactcaggaggttgaggcaagagaatcacttgaacctgggaggcagaggttgcagtgagccaagatcatgccactgcactccagcctgggtgacagaacaagactccgtctcaaaaaaaaaaaaaaaaaagaattaagataacctggctgaggttccatgtaatgtccccagacctgggtccactgaggcctctgtcccaaccagcttgcccctccccagccttgagtctctgtcctggtcccaccagggctttgcaggctgagcctttcttcctctccacagcagccttccctgcacccaccattgcggctatggatgggtttgccttgggcggaggcctagagcttgccctggcctgtgacctccgagtggcaggtactgggccaggactgggggcagggggtggggctagggagtcaggggtgagtgaaacagggtgagtctggacattctgcagtcagccactgttcttggcttccaaccaaaagcaaaactaaggcaaggcagagcacagagggtgctcaggcagaagctgcttcccctcctggtgcagccattagctgctgtagtatctgtgacctgtcagaacctgcttccttcattttgggaatatttgaccaacctcagagcaattgctgttacgagccaaggaggtcaaagagcaatgtccagtcttcccattctgtccaagtcagatttatcgaccatgtttcggaaaaaggtgagcctcagggatagtttgtcaatggctgagctaatcacaaaggtgcctgggcaggaatactggcaccagccaaatttgcattacttgttctgagcaattgagctttgtttgaagaatgggaggggataaagaagataactgatcattttctcaggtgactgacctggtgattaggagcagccttcttggatgcagttaggcaaagtctgaatgtcttcccttctccccccaccgctctctcctgccaccccaggagcaacatataaaaatgtgtagctccaggcatgaaagtagcttctgtctacacaatgcaggtcaaagagaaggaactgaccaggtgtccaggcaccaaaataccaggctggtctagccccaactctccttctcacatgcccacgttcacgcaactaactcacagggttttggggaagactaagacggagtgaatgtaaaacccactcccttctgcccacgttcacatggtccatgctgagggaattcagaaaaggagacagacccgggggggtgcgtcagtcaaggcaagtttctcgaaggaaggaagcagaactcaggaggacatggactggaacagtcagggcaatttcaggctgtgacaaagctggaacggacgactgtagcaggagcaggagtcactgacattctaggccaggccagggctaagccagagaacctattaatagtaatccacaaatagatatggggcacctcctaggaactctccttgttccaagcgtcgtacctcgtgtgatccttagcggctctctgaagcagacagaagagggccagccatctttcttccacctttgaggcttgggaagggtgagacttgctggtgacttacaactccatcaaaggggcatggtgaaataagggcctgggctcctgacttctgggctagggctcttccaaaggcagagtctggagaggcctggctgtggccagaccatggggcaagtggctagaggggcgagtagacagcagaggcagctgtggcccccgggattagcactgggggaccggatgggggagggaggcctcactttgttctatctgagcagcttcctcggcagtcatgggactgattgagaccacgcgagggctcctcccgggggcaggtaatcgcaactacagcacccgcccaattccaccccatccagggtccttcgctgctttccttttttgccctctgttctgggctctgccctcccacctgaaccctgctcctctgagaagtcttggctgagtcccaggctgagccttctctgggttcccacttcccatgctgattcccaccctgctccctccatcctggtaggagggactcagaggctgccccgttgtctgggggtggccctggcgaaggagctcatcttcacgggccgacgactgagtggaactgaggcccacgtactggggctggtgaatcacgctgtggcccagaacgaggagggggacgccgcctaccagcgggcacgagcactggcccaggagatcctgccccaggtgtggtgacagctcggcaccagaaggagggctggagtcatgggggaggcatgtgtggggcagggtgtccccttgggctgcacatccattctcccagagacatatgattaaccctctttggagtttgtttaaccatccagtaaacacaatcaagtcaaattttaattctgaattaaaatgtaaattgaattccaaagggctggaaccaaatgggcttgaaagccctctgaatgtaacactgtccagtagaccattctgagatgagataaatgttctatacttgtgcttatccagtatgggagccactagccaaatgatttaaattgcagaaaatgaatgcagttcctcattcacactagccacatttcaaatgctaatagccacatgtggcttgtggctactatactatatagcacagccttaaaatcccccaaagactgaaaaagcaagattctaaaatagatacagaacttccaacccatatttcctaccatactgcctggtgggatattcttgaaatacaacatgtgggctgggcagggtggctcatgcctgtaatcccagcactttgggaggctgaggcgggtgtatcacgaggttaggagttcaagaccaccctggccaatatggtgaaaccccgtctctactaaaaatacaaaaattagctgggtgtggaggcacgcacctgtaatcccagctactcaggaggctgaggcaggagaatcgcttgaacctgggaggcggaggttgcagtgagccaagatcgcgccattgcactccactgggcgacaggacgagacttcatctcaaaaaaaaaaaaaaaagaaagaaagaaagaaatacaacatacaggacatgtattaagcatttttttctttgaagagatagggtctcgctgtgtcatccaggctggagtgcagtggtgcaatcatggctcactgcagttttaaactcctgggctcaagtgatcctcccgcctcagcctcccaaagtgttagaattacaagcatgaaccaccgtgacgggccaggctcatgttttagccagatgtggtagttcgagcctgtaatcccagttatttgggaaaaagcattgcttgaacccatgaattcaaagctgcagtaagctggtcacgccactgcacttccagcctgggcaacaaagcaaaatcccgttgctaaaaacaaacaaacaaaaacaaaaagccaaaaaaaacaaccaaaaaacccctcattaaaaaaatcctcaaatagcatgggaaagggtgagggataaaagactacacgttgggtacggtgcaccaaaatcttagaaatcaccactaaagaacgtatccatgtaaccaaaagccacctgttccctaaaatctattgaaagaaaaaaattaaaaatcctcaaacaataacctctcagcatggtaccccaaagggtaccatgctcagtagggagcaggtcaggccctgcccaggtacaaccctaccagctgcagggcccaaagccctcagcagggatatctgggatctggctgtctggggtatccaaggccctgcgagggtctgctggcttctcccaactctcagggggcccaggatacagggggttgggtacaggagatcccaaatttccataaagattaaaagtggcttaaatggagctaagttagactaatttataataaatttgtcttagcctataatgctaggtaccttaatgtagtatctcagctcttagaataatccagttgaactgattatccccattttatctgtgagaaaacccataaaagttcagtgacttgttcatcaaggtcacaaagagtgattgtagtattagaaaaaaaaacaacaccggtattttggcatttattttgcacaatacagaatgcaatataaaaaaggtattttaagagagcaaaatatgtacaaaattttaaaaacaaactaaatatttaatgtatttcaaatacaaaaatttacaaatgtcacaaaacaaagttaaccatacatcattttaatattgacatatattgaattaatcatataaaagtaaccattttggcttagcatggtggctcacgcctgtaatcccagcactttgggaggctgaggtgggaagactgcttgagaccaggggttctagaccaggctgggcaacatagtgagacctcatttgtattaaaacagaaaagaagccgggtgcagtggctcattgctgtaatcccagcactttgggaggtcaagacaggaggatcacttgatgccaggagtttgagaccagcctggccaacatggcaaaaccctgtctttactaaaattacaaaatttagctgggcatggtggctcatgccttttattacagctactcaggaggctgaggcacgagaatcacttgagtctgggaggtggaggttgcagtgagccgagatcgcaccactgcactccagcccaagtgacagagcaagattctgttaataaaataaaatagtataattttgaacaaaaatcctttctttcctgtctctcaaatgtaaataatcctaatacttcttaaaacagatcttctttaatttggaggtgagggactatagctttttgaaagcatttgtcttttttttttttaagcttcatcatatataaatgaagagtctgatgctattgcctagacaatattaatgctgtcaagtttctattatacttggttagaaagtctccgaactaatacagaactctgggtcactcaatggagtggctgattgcagctttcatatctagacctgtagactatagggtttgtctttttgccttaactaaataacaatcacaaaataattcagatttccaaatatactaaaatattggtactatataattactgatattttcagtacttaaaagtagctttgtataccaaaacaccagtctaccaaaaacaagtactggcatgagtaatcccagagttgagaccttctgggtcaacctgaaaaacaaaacttcaacttccacctatgttactgggtgctcagaataaaggtttccggataggagagggccagggatggtgtagatggccaccatctagtggacaaaccactctgatagggtagcaaatggttccagagttttctcagcccagaaaaaaactgtcaatatccacagtttgcatcagatttccttcttaaatagtaaatacacattacactttgagaaatggattcagctgtgttttttttcttttctttttagagacaggatcttgctctgttgcccaggctggagtgcagtggcacgatcatagctcaccacagccttgaagccctgggcctgagcagtccttccacctcagcctctgaatagctgggactacaggtgcaagctactgacttggctagaatttggctgttttcactcacaaacatacgtacataccgtttttaactttaataaaaggttactttatttatttatttatttatttatttatttatttttgagacagggtctggctcttttgcccaggctggagtgcagtggcatgatcacagctcactggagcattgacctctcaggcccaagtgatccttccacctaagactactgagtagctgagactacaggtgcaagtcaccacgcccagctaattttttattttttgtagagatgggatctcatgatgatgcccaggctggtctcaaactctttgggcaagcaatcctcctgcctcagcctctcaaagccctgtgattacaggcgtgagccactgcacctggccaagattacttcctttattgggtagttacctaaataataacacatatggcaagcaaatctaaaagaacagaggagtaagaagggcataaggtaaaaatcaaaggcaagatgaccagctagtcctggtttacctgtgactaccccagttttaaaagtggaagtcccatatcccagtaacccttcagtcacaagcaaacccaaacagcccttcatttcccaatccctctctctccccagatcatcactattgtttccatactcttccagaaatttccattgcatatggaaggacgtgtattatgcacatatgcttacatatttaaataaattccttttaatggcttagaggacaagaaatatctttcgaggctaatctgtttctaacaaattttaaaaacaaaatttaaatatgcatagtaaggaattcaaacatggaagaatataaaacaaaaccttcattttatataacaaaacatttataaaccttcgtttataaaacaaaacaaaggtttggttttgttttataaaggcacaccagcattttgccagtttttgccaaattgctctcctgtggcatactcttttacttttctatcaataatgtatgtaaatactggtttccccagtctcggcagtagtaggcatattgatattttagtatttgctggtctgaggtgaaagggcacagtacctcactgttttgatttgcctttcaagcgtgtagcagctgctggacatccttcacgttcgtacttcttttccggtggaccttttacatactcttttgtaaatggtttaaaagttactttatactaacttttttgtaaatcaaggaaattcatctgtcataagcattgcaattctttttcccagttttttttttttttgagacttttcctgagaaagttttataaacacttcaaataatatgatataggaagtaattcctccttgcctggaagtggggctgagactggagtgctagggctggtgtggaaccaaggccagtgacaaagcagacactgttgcttctatgtggctgtattaaaatgcacccgcccctctgcactgccccacagaccaggatttcaacacagccctgtcgacttgaaagcccaagttcctaaccctgactttgtttcactctgctggggtaaaaccttaccgcagaggctggcatttgctgaaatgaggtcgaggaagtgggaaaggtggttgggagtccaatccaagtctcaccaatgattggataaacacagccaagtgcttcacctccctgcactgcaatctcacagctgtaaaatcacagctgggtcatcagtgatgacaccagcctagaagtgtgggtagcaccattagatgagtctgtgggggaggaaagcactttgtaaactagttatgttgtgcatgttggaaggatgggctgaataacaagaaacccaggtgttcagggatcagagtctggcttctttcatgatagaaaaagaacctcagctaacaggttataggactaacgctaaagaaactgtcagcagaatggctggaaccagacccagacatctgcctccctcctttaaaacaaagctgtgcacctcagacctgcaactatcagccttgatgccctcctcaaccaagactttttgcttttccctaggcccccattgccgtgcggctgggcaaagtagccattgaccgaggaacggaggtgagagggttttgggttgggacttgggtccactaaagttggtcgcggctgggacacagtgctttcagagctcagacagcacagctgggaaaaactcaggaagtggactcttctaacagacttgaactctgacctcgtgctctacgtcagtttacacatctgcaaattggccagacagtattattgtttacattctatcctcatctttctcccttggagagaggatgagattgaggttaagaaagggtaaatgatttgcccaaggtctcagaggaagtgagtagaaagaacccgggtctgtgtggctgccagtccatgctgcaagatttgtgctggcagtaatgtggcctcagggcagggcttggggtgatgccttgggtgtggctaatccatctgtccacctcaactctcccatctagttaatccatctgtccacctcaactctcccatctagtcactcatcacacactgaatccagaacaaagctgggaactgggatacagatggatgagttaaacatggtcactgcccccgggagggggcagatacagacacaaatcaaggataatggtaccacgctgacaccccagaaaggttagagctttgcggtccattatgatatccatgtgtggcttttaaattaaaagtaaaatgtggtcaggcgcggtggctcatgcctgtagtcccagcactttgggaggctgaggcgggcgatcacgaggtcaggagatcgagaccatcctggctaacacagtgaaaccccgtctctactaaaaatacaaaaaattagccaggcgtggtggcaggcacctgtagtcccagctactcaggaggctgaggcaggcgaatcgcttgaacccaggaggcggagtttgcagtgagccgagatcgcaccactgcactccagcctgggcgacagagcgagactccgtctcaaaataaataaataaataaataaaataaaatgttcagtttctccttcacgctaatcacagttcacgtgcttgacattcacatgcggctagtggctaccatactgggcagtgctcggttaaagactgttttctacagttggactgtgggaaggataaaaattccagaggaaaagtatgggcaaaggcacagaggaggataagcaagcagctcgtccagatgagagtgagggaagaagagagagtgcaagttcgaggcactaggctgtctgggttcaaagacctgctcttccacatactgttgtgaactttgacaaattatttcacctttctatgcctcaggtttctcagctgtagaatagggatactaacccttgctgtgaaaattaagttcacacacacatggtacttctcttagaatgaggctttcaagtgccagtcagtgggccctagaggctggagcaattgccagggcccaggtcataaaggttcagaaattaacgggtgacaggaagcgtggtgaggcagccggatgggaaggagaactcctcttctctggcaaaatgtctcagtctgtctcgtttctcccagcagttttgtcatagttacgaatggtgtttcttctctaggagggaaattccttctcatagctatctctgctcatatagatgtctgtaggcaatagggtgggctggcttccagtgtgggtgaagatggacaaggtcagaccaatccagggagcacgtctttcttgcaggtggacattgcatctgggatggccattgaagggatgtgctatgcccaggtatgtagcaaccagcccatgcctgcttgttaacataggctgggccaggctagagggactttgtatggtacatgaccaattttagaaggttcttctcaacacaaacagtctgaccgcatccatcgtccctcataagtcacctggagtggcttgaggagagccatagtgcttctctctgggacttttccctcaaccatctaatgtactggggttcatcctgcccacttaatgccgagaatcacagaacacaggtccttaagaggaagaaccacatcttttgcctctgtatcagatgccactgtaaagttcaggatggagttgggaggtcaagggcttggttgtagcctgcaggctgtgttcaatgtaggggctgtacacttgggactgacctattaaatctcttactcatgggtgagtaaaaaatgctaatctccacgttaacagatatccaaaatactcctaaggggtcctgggacttggagaaactagtgtgaacctggattcaaagccagatttcttactgcaaagaatttttttctctactgagcagcctcatgtcagaccactgcagacggcagctgagttctcaggaggcatgaaagcagtgtgcaagtggaggctaatgctgatggggcacagagaatacaaaggctggcctgtcttccccaggagacaaagcagccacggaggcttatacctttgcatgcctcaagatcagagtccagagacaatggaaacacttggaccctggccttgtcttgggctggacaagcttaagcaactctttttgggcctgtggccctgctcccccaaaactaatattttgtaccttgttgcagaatattccaacccgggaccggctagagggcatggcagccttcagggagaagcggactcccaaatttgttggcaaatgacccccattttaaccttcagcatgggagatgcatgccctgaagagcaggatccagaaggaagatttgtggccagattgccttcatcatttcacctctccagacttccatttcttcacaaggatgatgatggaaataaaatgactggcgtgatgcctggaaccaaggtgctgatcctaccacctactgctaccttccttagcttcaccctggctagaaataatcacgagggttgggtttgctttggaaaatgcctgtctctctacttgaatgataaagaattaaattagatctctctgagtcttggtatcattggctctcagcccctgacctctctcagttatcaggcactcattagagatgtcagaagattttaagatacccctagtttcttcctgtgaacaacagaggtaataaataaactctgacatcggttgaacatgtgtcaggggtcagactgcagatcccagtctctgccagttacttgctgtataaccgtggacaaattgtttaaatgctctgggcctcagcttcctcacctacaaaacaaaacttgtgaagatttagcaaaataaaaacacttcatattcaataaatatgttttaattgttaacttacagtgttttcgtgaggaccaaacgaaatcatcactgtgaaacacttttgtaaactacagggtggcagaaaattctttttattttttgagacagggtctcactctgccacccaggctccaggctagagtgcagtggcgccatctcaggtcactgcagcctccacttcccaggctcaagtgatcctcccacctcagcctctggagtagctgggactacaggcaaatgccaccatgcccagctaatttttgtatttttttgtagagacaggatttcgccatatcacccaggctggtcttgaactattgggctcaagcaatccgcccgcctgggcctcccaaagtgctgggattacaggtgtatgccactacacctagcctccaggagactctttgatagcatttaggagcactgagaagaaaggggcaattaactctaatggaaagaagggaggatccggaaatgggcaactaacattggaattgaagcctgaaggattaaggaacatttcaagtacagaagaggaagcttgacacagcatgagcaaaggtgaggaagaggatgatacacttagaaaaccaagagcaggctgatacataaccatactggtcccaatacccctccctcctctggtaccaaggctacatcttaagctatgcctttgcagtcattctccaactggatctgagcgctggctaagctgagcctcagcctggcctagagtcactaaaccatgggcatggatacaatataaataacattgcggatttctgcaaaatacaaatgtgctcccagggttatgcttgcatcctggaaggaagaataacacaggagagcccaggcctttacagtcagcacaaaccacaccagctatgacaacccaggaaagtaaccaccttactgaacttcctttttctcatctgttaagtgaggaaaataaaactcacctacccgtgaggattgttgtgaatgacacagaacttgaaaggatgtcttgtacagaattggacttaacacactagttcccctaacacatcctcacattagaataagctagcatctgataacaatgctctgaggtactagaacccaggtcaggaagatatccttttggaatcatgcaagagtgtgaaaaaatacagtacagtttaaggactatggaaggaagtaaggttacaaattctgcttatctggttggactctggtaatagtttggaacatggtttagagtaagagaatgagcttcttcctcatttgatttccaaagacagtacatggtactctagttaagaatctgaaccaagccagccaaaagcacaaaaatctaatcctaaaatgtgctaacagaaatttacttttattttctgaaaaacttaaacagataaatgacaaaacatgttcattaacagtcaacaataaggcaaggaaggaattcacactattcctcagagcagctccgcaaggcttatcaagtaagcttctgatatagtttatactgtagttgaagctggtttcagaaaagcccatgttttctttagtcagcatgcggggtaagaaaactccgtgaactctctggcaaagtctctttctggcctttcgtcttcctaccatttttggtcatggttccacccaaataaaatggagggattcagatttatcattacatgtaatctttcatctaaacactgtctgcaaatgcctaagtcccaccacgccctacaagctcactcacatacacagcatgtcatgctcacataacaggaaacatgccaaagatagacacccaaaattgtaaaaaggccaggtgcagtgactcacacctgtaatcccagcactttgggaggccgagacgggtggatcacgaggtcaggaggtcgagaccagcctgaccaatatggtgaaaccctgtctctactaaaaaatacaaaaattagccgggcgtggcggcatgtgcctgtagtcccagctactcaggaggctgaggcaggagaaccccttgaacctatgaggcagagatcacgccactgcactccagtctgggcgacagagactgtctccaaaaaaaaaaaaaaaaaaaaaaaactaaaagaaaatatttttctcccaaatgctaaaataaagtaagtaactatctggaattctacatccagctatattattatttaagagtaagaataggggtggggtgacaaagagattttgtcagtaatgcactatcaaaacctgaatccagaaaaggagtggtgggggttaaaaaaaagaaaaaaaaaaaaaaaaacaagcagtgatgagcaaagaaaatggtattcagcaaattgaggccaggcgccgtggctcacgcctgtaatcccagcactttgggaggccaaggcgggtggatcatgaggtccggagatcgagaccatcctggctaacacggtgaaaccccgtctctactaaaaataccaaaaaattagccgggcatggtggcgggcgcctgtagtcccagctactcgggaggctgaggcaggagaatggcgtgaacccgggaggcggaggttgcagtgagccgagatcgcgccactgcactccagcctgggcgacagagcgagactccgtctcaaaaaaaaaaaaaaaatggtatttagcaaattgaaataagccttgactgtaaaatagtaacacctaaactatctttaaggatatgaaaacaaggtagaactaaaatatatttattagtcatgttcttggatagaaatactcatttgtggctgaacatggtggctcatgcctgtaatcctagcactttgggaggctgatgcaagaggatcactcaagcccaggagttcacaaccagcctgggcaacatagcaagaccctgttgctttttgttttgaggtgtttttttttttaatttaaaagaaaaaaaattaaatactttttttaaagaaatactcatttgtcatagggatgggaattatctttaggttgacttataaatctaacatgatgctgataaaaatactgtaagggttgctctttttggggagaaccccaggcatggtggtgtatacccatagtcccagctatttgggaggctgaggtgacagcatcacctgagctgagactgcagtgagctgtgatcaagccgctgcacttcagccttggcaatgaagtgagaccctgtctcaaaaataaaataaattaaactaaattaaaattaaataaattttaaaaataaaataaaataagatgcttacccttctagttgttgtgaagattaaatgagttattcataaagtgcttacaacattgcctggcacataataagtactcaactgaattctagtttcggttagtttctcctgttataactgtatgagtctgtttcagggctattctgatccaatcatctgctatctatctattcatacgtcagaaccactcatggcaccattttacaatgttaagagaagtctatgtgcaagctcctaaaaaccacatttctttccttctttcttatcttagagacaggagtcttgctctgttccccaggctggaagtaggcagttgcctgatcatggctcactgtggccttgaattcctgcacaagtgatcctcctatcttggcctcccaaagtgctgggaatacaagtctgagccaccaggctgagcccataaaaaacatttttctggccagatgcagtgtctcatgcttgtaattccaacactttgggaggctgaggcgggcagatcacctgaggtcacaagttcgagaccagcctggccaacatggtgaaactctgtctctaacaaaaatacaaaaattagccaggtgtggtggtgggcacctgtaatcccagctactcgggaggctgaggcaggagaattgcttgaacccaggaggcagaggttgcagtgagccaagatagcaccattgcactcccgcctgggcaacaagagtgaaactccgtctcagaaaaaaacaaacaaacatttttgttagttctttcctgttgattctgtcagataaactttagaataattttcagatcctccatctcttacctattcagttgaattatattacattaataaactgaaaagaaatgacatctatatatctaataggtcattccatcttagaaaatggaatggtctcataattatttcaggcttttaaattatctcatagtttactgcatgtctcattacctgttaaaggcattttaaaatactttatgtttttgttaataaagtgagtggtggtatattttcccttaattacattttctgatttttgctggcattataaaactattggtttttatacacttgctttacagctagtcaacaagctaaacttttaattctaaaagttgtctcttgggtttcctgttgtaaaataatagcttatatctcctataatacaatgaaaaattgtataacaagtctcaacaaaggatatcaacggaaaattctcaaaggggattttatttttttaagacagagtgcagtggcactaacatagatcactgcagactcgaaatcctgagcttaagggatacttccactttggcttcactagatggatgccacacatacctggctaattttttttttaatgtaaaaaacatgggtggggtcttgctatgttgccctggctggtctcaaactcctggcctcaagcgatctcctgcctcggcctcccaaagtgctgtaatcccagcactttgggagacacctcacctggcctcaaaagggattttaaattgcaaaacatgcagaaatatttaatctgtctgggaaataacccctgactcctggcctcccagtctcccagagaccattacacagaagcaggtccatgttttactaaaggaagagtgtcagcaataaactgttgagtgaaaagaccaagctataggacagcatgcacagaatgagcccactttgttaaaaaatatatttcatatatacagcacatactaaatatagcatggatatagaaaagtatctgggagattaggtatcaaattattaacggtgcttgtctgtggggaatacaagtaggagcaaacttttactttttattttgcttgctatctacccccaaatagattactaattctgaagcattgctttaagctagtaatatcttttttcagtttctttttaaacacacctaaattcagaggacagaggtagacaatttttgcacatccatcttgaacttaatcattacacagaaaaatagctggaaaactattatgttttgaatatatgttgaatacatacgatttttactgcagacatgatacatagcccatagtgcccagagctgaacctctggttgagagaagttgccaaggagcgggaaaaatgtcttgaaagatctaaaacaaaaaaaagtacaaagatgttaatccagaacagttaggccagtgctcagggatataataatttgtactatataattaatataataatgtatataattttcacagccgggcatggtggctcatgcctgtaatcccagcactttgggaggccaaggtaggtggattgcttgagcttaggaattcgggaccagcctaggcaacaaggtgagcccccgtctctacaaaaaaaaaaaaaaaaaaaaaaaaaaaattagctgggcctggtggcacacgcctgtagggccaagtgggaggatcctcaagtgggaggatcacttgagcctgggaagtcaaggctgcattgagatgtgatcccgccactgcattccagctccagcctgggcaacagagagagaccctgactcaaaaggttgaaaaaaaaagaattttcaaattttaaacattttccccacagggtcaacttctccctgtgaccgagcatacaatgaagctattatttaagaaattgcattctgtattaaaccctttattatgatcagtatctcattgcatcctcaatcttgcacactgtcagcctcattttacagacaaggaaagctgaccttctagaaatgactttcccaatatcagagaaataggatttgaacataaggctaactgactctaacacgttatcactgtatcactgagtacagcctttaagaaaagctcaacactgggccaggcacggtggctcacgcctgtaatcccagcactttaggaggccgaggcgggcagatcacgaggtcaggagatcgagaccatcctggctaacatggtgaaaccccgtctccactaaaaatacaaaaaattagccgggcatggtggcgggtgcctgtagtcccagctactcgggaggctgaggcaggagaatggcgtgaacccgggaggtggagcttgcagtgagccaagattgtgccactgcactccagcctgggcgactgagcaagactctgtctcaaaaataaaaaaaagaagaaaaaaaaaagaagaa

SEQ ID NO: 776 - DNA, 465 bp, Homo sapiens
aaatgtgctaacagaaatttacttttattttctgaaaaacttaaacagataaatgacaaaacatgttcattaacagtcaacaataaggcaaggaaggaattcacactattcctcagagcagctccgcaaggcttatcaagtaagcttctgatatagtttatactgtagttgaagctggtttcagaaaagcccatgttttctttagtcagcatgcggggtaagaaaactccgtgaactctctggcaaagtctctttctggcctttcgtcttcctaccatttttggtcatggttccacccaaataaaatggagggattcagatttatcattacatgtaatctttcatctaaacactgtctgcaaatgcctaagtcccaccacgccctacaagctcactcacatacacagcatgtcatgctcacataacaggaaacatgccaaagatagacacccaaaattgtaaaaa

SEQ ID NO: 777 - DNA, 114 bp, Homo sapiens
cacgcctgtaatcccagcactttgggaggccaaggcgggcggatcacaaggtcaagagatcgagaccaacctggctaacacggtgaaaccccgtttctactaaaaatacaaaaa

SEQ ID NO: 778 - DNA, 464 bp, Homo sapiens
  misc_feature (246): n equals a,t,g, or c
aaatgtgctaacagaaatttacttttattttctgaaaaacttaaacagataaatgacaaaacatgttcattaacagtcaacaataaggcaaggaaggaattcacactattcctcagagcagctccgcaaggcttatcaagtaagcttctgatatagtttatactgtagttgaagctggtttcagaaaagcccatgttttctttagtcagcatgcggggtaagaaaactccgtgaactctctggcanagtctctttctggcctttcgtcttcctaccatttttggtcatggttcccacccaataaaatggagggattcagattatcattacatgtaatctttcatctaaacactgtctgcaaatgcctaagtcccaccacgccctacaagctcactcacatacacagaatgtcatgctcacataacaggaaacatgccaaagatagacacccaaaattgtaaaaa

SEQ ID NO: 779 - DNA, 1003 bp, Homo sapiens
aaattttaaaaacaaaatttaaatatgcatagtaaggaattcaaacatggaagaatataaaacaaaaccttcattttatataacaaaacatttataaaccttcgtttataaaacaaaacaaaggtttggttttgttttataaaggcacaccagcattttgccagtttttgccaaattgctctcctgtggcatactcttttacttttctatcaataatgtatgtaaatactggtttccccagtctcggcagtagtaggcatattgatattttagtatttgctggtctgaggtgaaagggcacagtacctcactgttttgatttgcctttcaagcgtgtagcagctgctggacatccttcacgttcgtacttcttttccggtggaccttttacatactcttttgtaaatggtttaaaagttactttatactaacttttttgtaaatcaaggaaattcatctgtcataagcattgcaattctttttcccagttttttttttttttgagacttttcctgagaaagttttataaacacttcaaataatatgatataggaagtaattcctccttgcctggaagtggggctgagactggagtgctagggctggtgtggaaccaaggccagtgacaaagcagacactgttgcttctatgtggctgtattaaaatgcacccacccctctgcaccgccccacagaccaggatttcaacacagccctgtcgacttgaaagcccaagttcctaaccctgactttgtttcactctgctggggtaaaaccttaccgcagaggctggcatttgctgaaatgaggtcgaggaagtgggaaaggtggttgggagtccaatccaagtctcaccaatgattggataaacacagccaagtgcttcacctccctgcactgcaatctcacagctgtaaaatcacagctgggtgatcagtgatgacaccagcctagaagtgtgggtagcaccattagatgagtctgtgggggaggaaagcactttg

SEQ ID NO: 780 - DNA, 673 bp, Homo sapiens
gcagattaagcctctgcccctgccagagggctcaaagggcaggaaaaggcagtgagagaaggagagacagaaaccaagatgacagtgcagaggaggcatggggatgagatcacacacggagccctcacagggaatgagttggggtcatttgatgttcatattagaagctgcaggttctgccttccactggggctgatggcacaagagcactgttacattttacctgctgcctttgagcttgaggttgggtggtaaaccattcttcactgttcttagcggctttatttctcatagagtcatgtgttgcttaacaacggggctacattctgagaaatgcatcattaggtgattgtggtcattgtgggagcatcacagagtgcacctacacagtcctagatggggtagcctactgcacaccaaggctacatggtgtatagcctgttgctcctagaatacaaacctggacagcatggtaccgggctgaatactgtaggcaactgtaacacaatggtaaatgtgtatctgaacatagaaaaggcacagtaaaaatacagtctaaaagattttttaaatagtacacctgtactgggcagttaccataaatggagcttgcaggactggaagctgcactgggtgagtcagcgagtgaatggtgagtgaatgtgaaggccta

SEQ ID NO: 781 - DNA, 906 bp, Homo sapiens
gttacttctcttttccatgacagagttacaactatttgtctgtcccccttccccattagagtatatggtccccaaaggaaagccccatgccattcactcaccacctaatcatccccaacaactagtgggcaaacatgaaacacttttgttgaataatgtgtttcctttagcccagggattacaaagtcaaaggcttacaagggggaaggactagcaggtgtgctcggaggggactctagccaactggagagtaactggtgagaagacaatgacatgctcttagggtgtctgctactcagatcctctcagttaagtcccgtgcacaaaggtgggtcaggtctactgttgccagatcttcagatcattcaaaagttacccgaattctggattttcatgcaaatctcccaatttttaaaaatgttggcatcaaattcagaatgttttaaccagccacactgtgtgggccagggaaaacaggcccaaaggccaggtgaagctgcagttttcaactgctgccttggcctctcccagagccccttaagtcctaagaaggctcagtcaacacactggcactcgtttcatcccactggttgagaaagcaagtcttagcaaagtaatgggggagtcttaccaaaactgcaaaggaaaaaaatatgataccatgaaattagaaattcactgcatttgaaatgaaaatgacttatttctgtacttctataactcacaaatttagcagacatcatttagacatttttgtagtgcaacagatttaaatctggaatttcatggtttgtaaatcactatgtgatactagctataaccatgagcaatattacgggcagtaaatgttgatttctatttcgtttcttgaagttttgtgtggttcatttttaaagtgagattcaa

SEQ ID NO: 782 - DNA, 906 bp, Homo sapiens
  misc_feature (390): n equals a,t,g, or c
  misc_feature (411): n equals a,t,g, or c
gttacttctcttttccatgacagagttacaactatttgtctgtcccccttccccattagagtatatggtccccaaaggaaagccccatgccattcactcaccacctaatcatccccaacaactagtgggcaaacatgaaacacttttgttgaataatgtgtttcctttagcccagggattacaaagtcaaaggcttacaagggggaaggactagcaggtgtgctcggaggggactctagccaactggagagtaactggtgagaagacaatgacatgctcttagggtgtctgctactcagatcctctcagttaagtcccgtgcacaaaggtgggtcaggtctactgttgccagatcttcagatcattcaaaagttacccgaattctggatnttcatgcaaatctcccaattnttaaaaatgtttgcatcaaattcagaatgttttaaccagccacactgtgtgggccagggaaaacaggcccaaaggccaggtgaagctgcagttttcaactgctgccttggcctctcccagagccccttaagtcctaagaaggctcagtcaacacactggcactcgtttcatcccactggttgagaaagcaagtcttagcaaagtaatgggggagtcttaccaaaactgcaaaggaaaaaaatatgataccatgaaattagaaattcactgcatttgaaatgaaaatgacttatttctgtacttctataactcacaaatttagcagacatcatttagacatttttgtagtgcaacagatttaaatctggaatttcatggtttgtaaatcactatgtgatactagctataaccatgagcaatattacgggcagtaaatgttgatttctatttcgtttcttgaagttttgtgtggttcatttttaaagtgagattcaa

SEQ ID NO: 783 - DNA, 303 bp, Homo sapiens
tctgtagtcaacatgtatatttttgtcattattccttaaacaatagtgtaactatttacatagcacttacattataataggtattataagtaatctaaatattaacataagcgggaggatttgtgtagattgtatgcatatacaacatcattttattccagagacttgagcatctgcgaatttggatatccaaaggaagtcctagaaccagttcccgacaaataccaagagatgactttactttagacctaagatcttgctagacagcctttgagaggatgaaggataactagagcagaagca

SEQ ID NO: 784 - DNA, 3635 bp, Homo sapiens
tttgttaccaagcaatgcatttatttggaaggataccagttaccagtcatcaaaagcttttgtatgttgaaaatgtaattttaatagttaattcttcatcttacataggagcacaataaaatacaccacaatctgaagaaactccagaattacgagaataagagtgaagaaaattcaaatgggctacaatatccattaccttaaactgcaagagacaaggttgcaacccgaaggttaacatttatgtatttatgactggctacatttatgacttaaaaataacaagaatcaggaattagatatggagagaggtgggaaagaacagttttgtgaggggaggaattcgtcaataaagaagaaaaattactgaattccaaattaaagaataaaacgagctcccacagcaaatactggagggatgaaagcaagaatcattaactgaggacttgatactctcaaagggataaacctttctgatgacacacaagctagatagttgagatctgctcatcaggtttataaggaagactcacaaatgcctcagcaaatcccaaatgatcagatcagtgtttcttaacacacatgaaaggttacagatgaaattttcagataagaaccaagaaaaatgtcataacccaaattttaggcaaaaatgtggcacaactgtgaaagtcctacatgtcagtcacaactgctatctttgctgtggctttcctgtacagtaatttataagcattgtggcaagacaacaatgatcatctaatcagacaacacaaacacatttatttcaaattcctagaaggttaaaaaaaggtcagatactgatgctttatgcatgctcagggccagtttataaatactccattcagtactatcttaacacaaatctgcatcagtgaaaagaaactggcaaaatccacctcttgccattcaatttgtcagatggtgaagaccaagaaagaatgttccatcagtttcaattttaaaatacgattgtcaaattgggaaaatgaaataaacacagtaaaataaactgtacaaaggcaaagtagaataacaaaaaatattttactaaaacataagatttacagaagtttccagacaagccatacaaaatggtcacaagctttttttgaaggggggaatctacacttgacagcaatgttattagtgagggctgtgatgtttgtttaatgttcccattttggttccaacaatcaagcttgtccatctacagcgtctaaataaagttagacttggctagagcatattctaaagacctggttagctgcttttaaccaatgcaattagatcaccaaaaaagggggaaaggagcccataaaattaaactacctcccccctcaaaaataaaataaaataaaataaaataaaaacacccacacccctgcagctaacctgacaactaccttcattcacagtgctttatacttaaaccaggatgggggaaatgaataaaagcagggaggggccactgcttttaaacgtttcacaacaatccagatgatacttctagcctctgctcatgctttatgacagtgaatcaggacaagacatagatttgctaatgtgcatttaatcaccaaaggactgaagatgtctgggcttttttattctgtaatgtttctaagactgtgtccattaaatgcaaacaaagaggaggaagtcttggcagaacaggagaagtgatgcacacttgatgatcgtatcaatttaaatattattcatggcatatagcctagtccatgctctagctgtagacagaaacaaacatacgattattattttacttagttcaatatgttactttccaaactataaatggcaaacaaccactattaattatggaaatgtcatgctgtaatctgttaaattcacgcctttttctataaattggatcagggctgaaagattttgtaaatgtccaattaccaaaacactacaataaaattaagaagttctagaaaattcaagaggatgaatcaagttgtccatttctagatacacaattctccccactaattttcttaaaatctgtagcagaagcttcttgactccaaattccgtagccataaacagctgaatactttaatcaaatgggttacaaaaacagttcaagttttccagtattctttacatataactagataaatggtatgcactcagtatttgttaaaccaggtgtagttacaagagactccaagatctttcaattacaggttgtctttatatttggggggtcccatagcaagccattttgttaagacgtatttacatactataagcaggatctcacttattatacttttttctatttcttttccttgccaagagctttagaaaagtttaagtggtaatacaaatttgtaaaagtggaagtggtgtgaaggagaatgaatattagatacctgtttctatggcttgggcttcgttggtcttccactgctccgctacatcatttgctaatggatcatctggattgggagcacttaacaaggcctggatcgatagcagcaactgtgcggatctgcagtgctggggaccacttatctatgaaggcaacaggcccagtatgataaagcatgaaaaaaacaggcccagaactgcttcacttccctcccacagacctctctgatctttgtataatgtttacattctaaacatggaatgcttaagagaaaaaggagaaagcttaataatagcatatgctgataaagataacacttacctttcaaaatatctaaacatattcttcccaacttgtctacattaggatgataaattttggtcatgaaacgtactttaggggctgccattgggtattcttctggaaggaatagttcaagtttaaaagtccctccctcaaagggggaatcctgagggccagcaatgaccacatgaaaataacgggcgttgctctcatctggttcggctttgatgccaggaactggttctgccagcaaacgctgggtttcctatgacagaaaaacaaacacatttgtgaaacaaatgtcattttgctagacaccaaaagtaaaattagaaagttcatctcttagaactacgcataatagaacagctccaatctcccaacagatttagcttataaaatgcaaaattcaaaaaaataccatttaaataattacaaccagctgaatgaaactgcaagcgaatactaatgatgttatcatacattttggctacaaatgtctacaaatatgttaataaaattagcttaataaaactgattttttactcaagtaaaataaagtaacattaggattacataagtaaggcaacttgctctaaactcaaccaaaaccaagctatttaaaaagtaaaattagcttttttggtggttttttttggcttgtttgtttgtttttgagacaagatctcactttgtcactcacgctggagtgcagtggcaagatcttggctcactgcagcctcgacctccctgggcccaggtgatcctcccaactcggcctcctgagtagctgggattacaggtgtgcgccaccacacctagctaatttttgtatttttagtagagacggtatcaccctgttggccaggctggtcttgaactcctggcctcaagtgatttgctcgcc

SEQ ID NO: 785 - DNA, 1493 bp, Homo sapiens
tttgttaccaagcaatgcatttatttggaaggataccagttaccagtcatcaaaagcttttgtatgttgaaaatgtaattttaatagttaattcttcatcttacataggagcacaataaaatacaccacaatctgaagaaactccagaattacgagaataagagtgaagaaaattcaaatgggctacaatatccattaccttaaactgcaagagacaaggttgcaacccgaaggttaacatttatgtatttatgactggctacatttatgacttaaaaataacaagaatcaggaattagatatggagagaggtgggaaagaacagttttgtgaggggaggaattcgtcaataaagaagaaaaattactgaattccaaattaaagaataaaacgagctcccacagcaaatactggagggatgaaagcaagaatcattaactgaggacttgatactctcaaagggataaacctttctgatgacacacaagctagatagttgagatctgctcatcaggtttataaggaagactcacaaatgcctcagcaaatcccaaatgatcagatcagtgtttcttaacacacatgaaaggttacagatgaaattttcagataagaaccaagaaaaatgtcataacccaaattttaggcaaaaatgtggcacaactgtgaaagtcctacatgtcagtcacaactgctatctttgctgtgactttcctgtacagtaatttttaaacattgtggcaagacaccaatgatcatctaatcagacaacacaaacacatttatttcaaattcctagaaggttaaaaaaaggtcagatactgatgctttatgcatgctcagggccagtttataaatactccattcagtactatcttaacacaaatctgcatcagtgaaaagaaactggcaaaatccacctcttgccattcaatttgtcagatggtgaagaccaagaaagaatgttccatcagtttcaattttaaaatacgattgtcaaattgggaaaatgaaataaacacagtaaaataaactgtacaaaggcaaagtagaataacaaaaaatattttactaaaacataagatttacagaagtttccagacaagccatacaaaatggtcacaagctttttttgaaggggggaatctacacttgacagcaatgttattagtgagggctgtgatgtttgtttaatgttcccattttggttccaacaatcaagcttgtccatctacagcgtctaaataaagttagacttggctagagcatattctaaagacctggttagctgcttttaaccaatgcaattagatcaccaaaaaagggggaaaggagcccataaaattaaactacctcccccctcaaaataaaatataataaaataaaataaaaacacccacacccctgcagctaacctgacaactaccttcattcacagtgctttatacttaaaccaggatggggggaaatgaataaaagcagggaggggccac

SEQ ID NO: 786 - DNA, 1341 bp, Homo sapiens
aataaatttaaactcaccatgcactctgatgttgaggggttttgtttgagacttggaacttcagcaggactctctccccaaacatttcctatctgatctccaagctgcttggtgtgcggtaatttaatgactatttgcggttcttctgttgcatagcagagttgtatttcttgtaataactcacaagtattgaaactagggaatcgtacaaatcatcgtttggcccttgggccataaatttaaaggttaaaataacagtaaaatttctatttaatgaccacctccttttaaaaatcaatattggtttaacacctattatgtgcttagcacagaaatctatccctcaagataagcataacataaaggtttaagcaaatcagccgtagtgaaagacctaataaacttgatacgctatctctgatgaccattgaaaaagtttaaactttggtaataatctggtgttggatctgctatgccttgcgagattaattttgttctggaagatcctgttttcctcctggcgcctacatccttttgttcctattcattcctttttgcaagtctttctgcacctgtgatgcttggagcctggtccccgggtggggaagcaaggaagtgagtagtcgttatttacacatgaattcaaacgtgtaggcacagcgactttgccaattttatgttaattacaaaatgcatttactgaggatatctttgaaaagtggtttttctttgaaaaggaatttgcgaactaatctgagttcatgcagagaagtaacgtaaatcttcattacatttatttttcttcctgcaaactggaaatgtgggatctaaattaaaaagttttcacaactagctattatatttataagtacttttgtgagcgctaaagttttgtctctatgaaaagtataggaaatggagtggcatgctataaatgttttatgacacttagtttgagatacccacaactggcactcagagtgagttacgcaggcaataccaaacaagtggcaataaaacctttatagtccctcacaccattatgtagtttgtttatgtcacataaatcagggaaagatattaagggaaaattctagtgagtatttttagtaatattactctgtcaccatatgttcctttgccatttaaatgaaatttccttagttcactctaaatcagtacaattatatttattttcaaatgttacatgtctacaaataacatcattacattttttatcaatactatttttaattgacaaatcataattgcatacatttatggggtacaatgtgatgctttgatatatgtaaataaatcttttaaaaattttgtacactt

SEQ ID NO: 787 - DNA, 425 bp, Homo sapiens
ggacgcttcgcgagggacagttggggccgagaaggcgcgggtcctgcggggcccggccgacttcagggactccgaggggcgcccgccagccggagcccgcgaaccgcagacttcccgccttccgcagcccggaagggagctgtccgcactcgccgcggcccgcgtgggaagggaccgcgcctggctatcgccccgcgcgggggaggggaagtggagtggaacccagcgtagggcgctgctcaggggtagccgggtcaacgctttgcttggagctcactatttgacccttcgggttattttgagggactccagtactcagttccctgatcgcgatttctttctctgcgccccaatccagaaacagctgagcgagctcttttgcagttccgcttactccctccccaaagcttgctgggctagaggac

SEQ ID NO: 788 - DNA, 345 bp, Homo sapiens
actgcaacctccgcctcccggattcaagcgattctcctgcctcagcctcctgagtagctgggaatacaggcgcatgccaccacgcccagctaatttttttgtatttttagtagagacgggtttcaccattttggccaggctagtctcgaactcttgacctcagatgatccgcctgcctcagcctcccaaagttctgggattacaggcgtgagccaccgcgacctgtgaaatacgtattgattttctaatgggatgggagttagggtggaaaatgtggggagattgttcatgggcatgttctaaggcatgactaactctagacaataaactcagaaggaagtggga

SEQ ID NO: 789 - DNA, 465 bp, Homo sapiens
atcaaccggtggcgcattgccacgaagcaggccaatgggaggacatcaatgtcccctccaatgactagggtgggcacccccaacacccacgagggcagagtgctgcttgctgctggccaggcccctgcgtgggcccaagctggactctggccactccctggccaggctttggggaggcctggagtcatggccccacagggcttgaagcccggggccgccattgacagagggacaagcaatgggctggctgaggcctgggaccacttggccttctcctcggagagcctgcctgcctgggcgggcccgcccgccaccgcagcctcccagctgctctccgtgtctccaatctcccttttgttttgatgcatttctgttttaatttattttccaggcacccactgtagtttagtgatccccagtgtcccccttccctatgggaataataaaagtctctctcttaatgac

SEQ ID NO: 790 - DNA, 1380 bp, Homo sapiens
tcctccctgtccttgtctgtccaaggagaatgaggtctcactggtggatttcggactaccctgaggagctggcacctgagggacaaggccccccacctgcccagctccagcctctgatgaggggtgggagagagctacatgaggttgctaagaaagcctcccctgaaggagaccacacagtgtgtgaggttggagtctctagcagcgggttctgtgcccccagggatagtctggctgtccaggcactgctcttgatataaacaccacctcctagttatgaaaccatgcccattctgcctctctgtatggaaaagagcatggggctggcccgtggggtggtgtccactttaggccctgtgggagatcatgggaacccacgcagtgggtcataggctctctcatttactactcacatccactctgtgaagaagcgattatgatctctcctctagaaactcgtagagtcccatgtctgccggcttccagagcctgcactcctccaccttggcttggctttgctggggctagaggagctaggatgcacagcagctctgtgaccctttgtttgagaggaacaggaaaaccacccttctctctggcccactgtgtcctcttcctgccctgccatccccttctgtgaatgttagacccatgggagcagctggtcagaggggaccccggcctggggcccctaaccctatgtagcctcagtcttcccatcaggctctcagctcagcctgagtgttgaggccccagtggctgctctgggggcctcctgagtttctcatctgtgcccctccctccctggcccaggtgaaggtgtggttccagaaccggaggacaaagtacaaacggcagaagctggaggaggaagggcctgagtccgagcagaagaagaagggctcccatcacatcaaccggtggcgcattgccacgaagcaggccaatggggaggacatcgatgtcacctccaatgactagggtgggcaaccacaaacccacgagggcagagtgctgcttgctgctggccaggcccctgcgtgggcccaagctggactctggccactccctggccaggctttggggaggcctggagtcatggccccacaggcttgaagcccggggccgccattgacagagggacaagcaatgggctggctgaggcctgggaccacttggccttctcctcggagagcctgcctgcctgggcccgcccgccatcacgacagcctcccagctgctctccgtgtctccaatctcccttttgttttgatgcatttctgttttaatttattttccaggcaccactgtagtttagtgatccccagtgtcccccttccctatgggaataataaaagtctctctcttaatgacacgggc

SEQ ID NO: 791 - DNA, 451 bp, Homo sapiens
ctccatcagtcaggaatgcattctgcacatcttgaaagtcctaacatggataagtccagattaacccacatggcgaccctcactgccaagcaggtgggatcacttctgggagcacacatgcccaggtgtggaaggaaggtgggaggaagagtcatccttttggccccagtgggggacagagaaaggggtgagctgttcctctcaagatcctgcctcacttggtagggggagggggtccaggaagatcacagcagagcaccccctgtcatccgaataaagggctggaagggacccaaggaaacctgccagtctcccgaggccaggcctgcggggggcggggcggggagtccctgccgcactcccatccaccccccatgttgtgcctctccctgcagacggtaaatattggtgttgtgacttcattaataaaggcttctgtgagcctgaaaaa

SEQ ID NO: 792 - DNA, 10113 bp, Homo sapiens
tttatttatttagaacacagactgcagagtagtatgatggatctccagctccagttgtcaccatcttgctgttcttgtttcacctatcactgcctctaatcttttttgagtattttaaatcccatttttcagttttccaggtgattctaatgtgcagccaaaggttgaattactgaaatggatcctcaaaatcttatgacataaatttgttcatacctactcttcattccacaagagggaacgaaaggttactcatttaaaaatcttaaacattttaatatttaaatctgtccaggaatctcatgtcctgtaagattacatattgtctttcttggctgttgactggttcctggaaattagggtcagagtctttgcctggatcagagctcctgttcccatgccgtgccctgcacacccctccacactgcagcctgttccctctggagttcagggaggctttagacccagctatggctgctgcgcctcgacctgtcttcgtctctagctgccgtgctgttcctggtctctgctgccgcctaacttggggttctgtctcctaggtacatccccaccgcagctgcgtttggcggtttgtgcattggcgccctgtcagtgctggctgacttcctgggggccattggatctggcactggaattctgctagcagtcactattatttaccagtattttgaaatatttgttaaagaacaggccgaagttggtgggatgggtgctttgtttttctaaatgttcaaatatttcattttgtgcgtgtgaaagggaaaacactttgacggatcgtttttgtcagatgacactggtggctccccttttctcccctcacagtttcttgtttcgagtgctgactgacccgtttctgaaatgggcaccgagctaagtctgtgtgcagcattagtacccgctgccttaaaactcaagtttacattattcattaaaaaaagtacatctagtgttgcctgtaatgctggaaaccagtgtatctaccttgctgtgttaaatcatgacagtgagacggtgagatggattcgttttgcacacaacattcaaaacacttcatattgcccccacttgttgaaaaataaatgtagttcaaattgccactttccagtatttttgagcttatttaatgagttctggaacatttatatctaatctatattttagataattactttttatacttttttaactcatggtatccccactccccacccccacctcatttttatttgtcccttctcaaagcagccacttagcccacatgggcgaaatcaagtctccagttatttctgccacaactgcttctaaggcctcctccttctcctcctcctcttcctcttcctccttttccttctcctcctcctctcttcccagtgacagcatcatcgtgctgtttgcctgtattggctatgccttctaactccaaccagtcacttgagaatattctttcaagattctgggccccgattcttttctgtttaaatccctaaagcaaagatctaattctcaagcaatgtctgtagttcagtgggggtgaacaatgaatatattcatgctaggaatttgtgtctgttgttgtactcacagcagcaacatgagtgtaaacagtagacaataaacttttatttaagaaaactgattcagttgtgttggaaaaaataaagaaatctgatattaaacgttttctaagatcatttgtataggttcagtgtattcataagaagtccaccctgagatgcctgtaaaagtcaaatgtaattacacttcaaactttaatcctaaattattgacagatagatagatagtgaccaacttaagggtaatcatatatgtgactaacatttgggaggaaacaggaaaacagtggtctcaaaacaacaatatcccagtctccatttgaaagagcatagatcttggtaaatcattttgaaaactatgtgctttatttcccaaaagatcaaacttaatttttaaaagacacccttttcagaagtatgggttttcattgctgtttagtttcttaggtgtggtatgtcttacgtagcttatgcttacaaagccaaataatcgcagggcaaggcagataaaggcaggcaggatagtgacagtggctcggtgagcatccgccaagggcctcagaccactgttaccataaaaacatccacccagtgttatgacgtccgatttttttttcccttaagaaggtggaaatatggcttttaatacataggaaaccttcagtttttaaatgcagggcaaataaacatttttaaacagtgccagccagactgccagttctcaaacagactgaatttccaaagcacaaccttttcatgtttataaaaaatagaaatggcatttagggatacattctaggatttggctctgacttctaagttgcactcttaggaagaaggagaggataagcttaggtcagctgcagaggtcattcccatggggagtggctggggaggaactgggctatgtggaaagactgggctgcgcccgtctacggatgccttctctcttgatttcaatgattgatagcatgtggctttcagacctaaggaagagttagagctttggagaatcacaatgcctgtgattgaaatcaggatttaaaaaagggttagaggcataggggaaggctaccattacaggaagtagttggatcttaattttcacatgtatagggctagacagcttcatctgtaaagttctgtatttccataattgttttatctttaggaagtccagtgtaaagatcttacagtttcactcataaaaatatcctgggctcagacagtgagcctgtggacaaacggaggctactgcagcattctggcattagcactctgattttatctggagagccctttcatatggttctcagggcctggcttacccgctggagccaggctagaaacatgacttagggctggatgagaatcatcctgagaattccgtgggggccagactggaaagtcctggaaaatcatggagctgctggaggccctaaaagtcaacacaaaaagagctaaactcactcaagaagctaagaaaatggcccaggaacactggtagaactgctagatgacagggtttcaggcatgggaaccagatcaatctgtacttcttgctgtgaactactctgtattgggtttcaggtactggctgatcttgctggttctgttcatggtttaacatcaagatattactgccccaaacatgtcagtcttacagatttgttttcagaaacttcaagtactctttgaggtaagaataggaaaagagatcctcaagcacgtgcagatgcttgcgggatggacctgaattttcattagtctcctagccttggtgtagtgaatggagtcaaccgttttccttacttaaaagctggttcagcctcagtaaatagatgaactgaaaactagtagaggattctatcgaaccctaccctagttggattcaactaccctagataaattttgcatagtaaaaattcaattagaagaggccaaaaagccttttttttctttttaacgctgttttaaacactaacggagtacatggttatttgcatacccagcttagaattttatattgggggttgagagtggaaatgacctaattgagaactcaggtctatttctctatacaaatacccctgtctaccagactggactagaaaagtaactgagctgtagttaactgctgttgagctttaaaaaaattggagtaaacatacttgcatttatattctttgttaattttagctggagttataacaaatttaaaggaaggtcacaacctacctgtaattacaattccataccaccaccacatctgttctgtgcttttattttacgaaaaagctaatggcaaatctacattaaactaagttgaatacaaagtcttagtgaagaaggcctggtggtctcgtttacaaaaatggccagtgtcatatttgggcttaaaatttcaagaagggcacttcaaatggctttgcatttgcatgtttcagtgctagagcgtaggaatagaccctggcgtccactgtgagatgttcttcagctaccagagctgtggaaagcaaagaaaacaacttagatcatgccgttaaggaaggacaaaacatcttattcaatcagtgtttgcgcagcaggtactactatatgtcacttcctatgctagatgctggtgataacgttttttttggtctataaggatcttaaagaataaagactataaaggcaagattacattcctagcatgagacaagaacatcagggataatgattttttttttttttggtgagacagtctcgctctgttgcccaagctagagggcaatggcgtgatctcggctcactgcaacctctgcctcctgggtttaagcgattctcctgcctcagcctccccagtagctgggactataggcgcacgccaccacgcccagctaatttttgtatttttagtagagacggggtttttgccatgttggccaggatggtttcgatctcctgacctcgtgatccacccgcctcagcctcccaaagtgctgggattacaggcgtgagctaccgcacccagccagggatgattttatgtgtgaaaacagcaaagttggaagtgtatagagccaatcgctatacctcatttatagctggggtagggctttgcttttctgaaaccagatggtgatgattatgtaggatcttagggattccatcttttctgctgctaggggatacatatgttcccccggcaagttaaactgtgtgcatgttaggactggagatctactaccaagaatgcggtctcaggaccttattaccacaggctttcattaaaatttgtttcactcagatggaggttgccagatgtaaaatcagcctcttgttttcctagccgcttgtttgggaacaagcctggggacatttgcaggcaggaagcatgtcctactcacctgggcacagcaggtgcttggtaactggcagatgctactctttgtagcaaactgatctttttttaattttttttttatgtttttgagatggagtctcactttgtcgccaggctgcagtgcagtgccacgatcttggctcactgcaacctgcgcctcccgggttcaagcgattctcctgccccagcctcctgagtagctgggactaccggcatgtaccaccatgcctggctaatttttgtatttttagtagagatggggttttactatgttggccaggctggtctggagctcctgacctcaagtgatcagcctacctcggcctcccaaagtgctgggattacaggcgtgagccaccgcacccggccagcaaactgatcttaaaatgtaatactttccttccgacttctcaaatgttgctggttgaataaacggtttgattactgtattttgattctgctaaagctaggcaacttggttcttttacccctcctcctttatagccatagtagccctctctccacctcccctcacttattctatttttttctcccttttctaagaccaaaagtgaagttaagaaggtggaagggagaaggaagacattttacaaaaaggatactcttctactaaaagataaccccgcacggcatttcacacttgcctacgtcaccctgctttccacgcacctcctcagagggaggggctgttattgttcctgttttatgaaaaaagccgagagaggctacagaacctgtttgatgtgatagctaattatggtccgcggagcctcaaaccgagtcgggcctgtgactccgagctgcgctgcctcgtattgattgtcatgcctttctccaaatacgcaccagataaactattgtatctattcagtatgattgttctaactctggctttgagctgtcgaggtggcttctaccttaggtctagtttttggaaaggtgaagcaggagtggaagctctctaagggatacgaaatctgattttatccaaagaaatcacagcagcctttgaaagacacattcagattttcaaacaaacaacagacaattcaaaaccaggcgctctgcttattcactgaaaccgtaagctgctgaaactcagggaaaagcttaagaaactggtcttaaagcttcaggccaaacaatgcttcaaatcacatttgaagtaatcacttaaaaacagtagaaaaatcagttatcaattacctaaaacacttatacccaataaaatattcccatgatgacaagtgtctgcttctttctagatgagtgaaagggatttgccagcccatacagaggtgctccttgaagggcccatggtatgtctccatacagtatctcctcgtctccacacagtatctcctcatgtctccatacagtatctcctctcgtggttttatcaaaggacttttctccccataagcttactgtttacaaagtctctaaaagatgggtggccaagaattatacaatgcatctacatgaccagtgatttctaagggccacacagctggtttggtttattatgtgaaaagcatatcacacggagtatacaggaaatacctcaagtatttgttgaaggagcatcatcaatttctccttgaacatacagcctccacaaaggaccatccctcatactagcatacttgaggaaaagctaacagcttatctacccacacctttgcattgctatggactgaaggtttaaagtgtagaatcgttttggctactcagcaggaatgtcatctgggccattctgtaggagaaaaagcctctaccaaaagtttgcacttgacccagaatgctttgctcttattttcaaactctgtgccacccagaaaggaaaattagtagtggtcacctgcagttttacaagttgctaggcatttgactttagtgatacaaaaaagataaagaaatggagttatatttagtacccagtttgctgggatggggacggggagaactggagaaactgggtggcggtctggagaatgcttaccatcaagtctctgcagcaggtcattcttgggtaaagaaatgacttccacaaactctaaacagacaaagtgcaagtgaaaacaaagctaacgtcaagagcctaccaaaacaacccaaaatgtctgcagccatcaccactacactaagtcatacacgctcggccaccaggagttgcagaacatacctccatcccctggaaataaacagaaggaaaacatttcagcaaggcctggagtggtaacatcggaagacttttatacaagaggcgtcaaaaaggctttgagaatttcacagaagcctgggtttctgctaacttaatttatatacattgtcaaactcgagcagtatgaagttattgttctccacataatgttaagtagcaaaatttaaagcatattcgatagtatgtatatttttatagatatgaatctgcgtattatgtaaaatatacagaacatataaaaacttaccttttaaccactatgaaggtacaattcagtagcattaaataacattcaaaaaggtgcacaaccaccaccagtatccatctccagaacttttcatgacacccaacagaaactcgggatccactcaacactaattccccatccctagtagcgcttactctactgtcttcctctatcagtttgtctattctgggcacccagatacgtagaatcagagtatttgcccatcatgttatcgcatgtttcagcgtgtatgtgtgtttgtgtgtataccacactttgtggatgcattcatctgctggcagacacctgggttgtttccacagaggcggccatgaacacaggcacgcaagtatatgagtccctgtttcacttcttctgggtgtagacttaggagatgaaatgccagatcatataataattctgtatctaatatgctgaggaactgccaaacttttccacagtgtctcatatgtatatgtgcagttcaaaaattaagatttattttatttatttatttatttatttatttatttatttatttatttatttattttttggagacagggtctcagtctgttgcccgggctggagtgcagtggtgtgatcttgactcactgcaacctccgcctcctgggttcaagtgattcttgtgtctcagcttcccgagtagctgggattacaggtgcgcaccaccatgcctggctaatttttgtatttttagtagagtcagggtttcaccatgttggccaggctgatctcgagctcctgacctcaagtgatccacccacctcaaccttccaaagtgctgggattacaggcatgagccaccacgcccggcaaaaaataagacttaaaattagttgcagtgggatactgaaacataaatatgaacaactgaagagggtaagaagttaaagaatatcactgatactgatttactgtggtgcacatataaataccccctttaaaaggatgggagagacaacacggaattgacagagacatcacagcttttgaatccaaagttgctaagaaatattatagagcaaagagaaatagtgaataatctgctgcccgttaacaattacttaggccatttttttttttttaagagagacatggtctcattctgtcacagagtggcaccatcatagctcctccaactcctgggcttaagtgatcctcctgcctcaccttccagagcagctgggactacaggggaacttaggccattcttaaaatatacatgaagacagaaaccagggtgatttaagtttctcactgtttactacttaagcctgcagctcatattactaagtgggaatacacttcatatagaaaacagggaaatatgtcatttaacatttttttacaaagaaagcgtaaagatgaatgaagtggcaaaagaaaaatgctaaaatacatgattaggaagagagacaagaatactgatgaagtctatttgaaagaccgattctttccatgaaagactacattcttttaataaatcaaactagcagcaagttccaagacacgtaatgcaaccacaccaccttcatcacagccgacacacacatacctggctttggcttcggccttgcgttttcggcatcatctccgttaatggtgactgtcacgatgtgtatagtacagtttgacaagcctgggtccatacagaccgctgtggagagaagggacagtcagatgcgtcagtccctttggcatttgtttcactatggtcttaggaagaagatgcgtcccgcagctcagcattgacgtggaggtgatgcgggaaaactagttctcacatttggtaggcagatctgcaggctgcaaagcatctgggcactcacactctccccagagctctcgagtcaagcttgctaggtctgcggggttagatggtactgtcaagtcataaaatcccttcaccacatcaaactcaaaaaaatcttccagtgatgagggtagcacatgcatgagatgggtgagcaataaaactcagggggtaggaaattcctaaaggcaattgattttttgagacagagtttcactttgctcttattgcccaggatggagtgcactggcgtgatcttggctcactgcaacctctgcctcctgggttcaattctcctgcctcagcctcccgagtagctgggatcacaggtgtgcgccacccggctaatttttgtatttttagtagagatgggtttcaccatgttggtcaggctggtctcgaactcctgacctcaggtgatccacctgcctcggcctcccaaagtgctgggattacaggcatgagccaccacatccagccaaaaggcaatttaatttcattaattctcccccaacttcaggcccttctggctccagtttcctcctgggaggggagattcccttacacttggtgaccagtcctaatctgtgatttctttctcttcagtgaattctgagcgtaaagaacacccaaataatcaatcccttcccagacggaggaatccatcacttggtgaattttcaagcaataccaacctggagaacattcggcaatgtcccctttgtagccagtttcttcttcaagctcccggagagcagctgcttctggggtttcaccatcatctatgagacctgcaag

SEQ ID NO: 793 - DNA, 11655 bp, Homo sapiens
gtagctaaacagctgaaagaacagcagatggtaatgaggggccaccgagatacctctatggttcatgagcttaataggtaaggctgctagactgacacctttataggcctgtgtttgtgtttcagtctttcagtgttggctaaatgtttttctttgttcaagttcatatttaaaacccttctattcacacagatgaatcaaaatttcacacaaaacttgttttccatgtcaaaaccaacacctgaatttttcattgaaattgtgagcactgctctgctcatcccagtgataaaatcttgcagatcagtgctgttctcagcattggctggctgcacatacaatcaccagagagcttttaaaaaggatttcccaggaactgtggcttatttggtctggggtgagttccaggcatcagggttttattttttggtaacagctttattgagataaaattcagataccatgtaattcactcacttgaagtatattgttcagtgttttttagtatattcagacttgtacagtcataagtttaaacacattttcaccacccagaaagaaaccctgtacctactagcccaccttcccaaccaccagccccagacagccacttttaactttgtctctacagatttgcctattctgtacatttcatataaatggaatcatataatgtatgttattttgtaagtggcttctttcacttggcatcatgttttcacagttcatatccttaattcttttcatgaataatattcaattgtagggctttaccacactttatcagttgatagaaatctgggttgtttccactttttatgaataatgctgttgtgaacatatttgtacaaattttgtgctgctcagctgtcttccaggttggctgctgtagtccacattcccaccagcagtgtatgaggttccactgctgcctgtcctcgccagcactagctctggctttttaatttcagccatcctgatggatgcgaagtggggcacaatcacagctcaccgcagcctcttgggctcaagcgatcctccccgcctcaacctccagagtagcttgggaccacaggtgtgtgccaccacggccagctagcttttttttttttttttttttttttttatctgagatggggcctcactttgtcacccaggctggagtgcagtggcaccgtcttggctcactgcaacctcgacctcctgggatcaagcgattctcctgtctcagcctccctagtagcagggattacaggcacgcaccaccatgcccggctaatttttgtatttttagtagagatgggtttccccatgttggccaggctcgtcttgaacttctgatctaatcatccacccgccttggcctcccaaagtgttgggattacaggcatgagccaccatgcctggtgggatccagattccttcttttgcttgggggcatcctgttgtcccagcatcatttgttgaaaaggcactagtatttttccttaaactttttatttatttagaacacagactgcagagtagtatgatggatctccagctccagttgtcaccatcttgctgttcttgtttcacctatcactgcctctaatcttttttgagtattttaaatcccatttttcagttttccaggtgattctaatgtgcagccaaaggttgaattactgaaatggatcctcaaaatcttatgacataaatttgttcatacctactcttcattccacaagagggaacgaaaggttactcatttaaaaatcttaaacattttaatatttaaatctgtccaggaatctcatgtcctgtaagattacatattgtctttcttggctgttgactggttcctggaaattagggtcagagtctttgcctggatcagagctcctgttcccatgccgtgccctgcacacccctccacactgcagcctgttccctctggagttcagggaggctttagacccagctatggctgctgcgcctcgacctgtcttcgtctctagctgccgtgctgttcctggtctctgctgccgcctaacttggggttctgtctcctaggtacatccccaccgcagctgcgtttggcggtttgtgcattggcgccctgtcagtgctggctgacttcctgggggccattggatctggcactggaattctgctagcagtcactattatttaccagtattttgaaatatttgttaaagaacaggccgaagttggtgggatgggtgctttgtttttctaaatgttcaaatatttcattttgtgcgtgtgaaagggaaaacactttgacggatcgtttttgtcagatgacactggtggctccccttttctcccctcacagtttcttgtttcgagtgctgactgacccgtttctgaaatgggcaccgagctaagtctgtgtgcagcattagtacccgctgccttaaaactcaagtttacattattcattaaaaaaagtacatctagtgttgcctgtaatgctggaaaccagtgtatctaccttgctgtgttaaatcatgacagtgagacggtgagatggattcgttttgcacacaacattcaaaacacttcatattgcccccacttgttgaaaaataaatgtagttcaaattgccactttccagtatttttgagcttatttaatgagttctggaacatttatatctaatctatattttagataattactttttatacttttttaactcatggtatccccactccccacccccacctcatttttatttgtcccttctcaaagcagccacttagcccacatgggcgaaatcaagtctccagttatttctgccacaactgcttctaaggcctcctccttctcctcctcctcttcctcttcctccttttccttctcctcctcctctcttcccagtgacagcatcatcgtgctgtttgcctgtattggctatgccttctaactccaaccagtcacttgagaatattctttcaagattctgggccccgattcttttctgtttaaatccctaaagcaaagatctaattctcaagcaatgtctgtagttcagtgggggtgaacaatgaatatattcatgctaggaatttgtgtctgttgttgtactcacagcagcaacatgagtgtaaacagtagacaataaacttttatttaagaaaactgattcagttgtgttggaaaaaataaagaaatctgatattaaacgttttctaagatcatttgtataggttcagtgtattcataagaagtccaccctgagatgcctgtaaaagtcaaatgtaattacacttcaaactttaatcctaaattattgacagatagatagatagtgaccaacttaagggtaatcatatatgtgactaacatttgggaggaaacaggaaaacagtggtctcaaaacaacaatatcccagtctccatttgaaagagcatagatcttggtaaatcattttgaaaactatgtgctttatttcccaaaagatcaaacttaatttttaaaagacacccttttcagaagtatgggttttcattgctgtttagtttcttaggtgtggtatgtcttacgtagcttatgcttacaaagccaaataatcgcagggcaaggcagataaaggcaggcaggatagtgacagtggctcggtgagcatccgccaagggcctcagaccactgttaccataaaaacatccacccagtgttatgacgtccgatttttttttcccttaagaaggtggaaatatggcttttaatacataggaaaccttcagtttttaaatgcagggcaaataaacatttttaaacagtgccagccagactgccagttctcaaacagactgaatttccaaagcacaaccttttcatgtttataaaaaatagaaatggcatttagggatacattctaggatttggctctgacttctaagttgcactcttaggaagaaggagaggataagcttaggtcagctgcagaggtcattcccatggggagtggctggggaggaactgggctatgtggaaagactgggctgcgcccgtctacggatgccttctctcttgatttcaatgattgatagcatgtggctttcagacctaaggaagagttagagctttggagaatcacaatgcctgtgattgaaatcaggatttaaaaaagggttagaggcataggggaaggctaccattacaggaagtagttggatcttaattttcacatgtatagggctagacagcttcatctgtaaagttctgtatttccataattgttttatctttaggaagtccagtgtaaagatcttacagtttcactcataaaaatatcctgggctcagacagtgagcctgtggacaaacggaggctactgcagcattctggcattagcactctgattttatctggagagccctttcatatggttctcagggcctggcttacccgctggagccaggctagaaacatgacttagggctggatgagaatcatcctgagaattccgtgggggccagactggaaagtcctggaaaatcatggagctgctggaggccctaaaagtcaacacaaaaagagctaaactcactcaagaagctaagaaaatggcccaggaacactggtagaactgctagatgacagggtttcaggcatgggaaccagatcaatctgtacttcttgctgtgaactactctgtattgggtttcaggtactggctgatcttgctggttctgttcatggtttaacatcaagatattactgccccaaacatgtcagtcttacagatttgttttcagaaacttcaagtactctttgaggtaagaataggaaaagagatcctcaagcacgtgcagatgcttgcgggatggacctgaattttcattagtctcctagccttggtgtagtgaatggagtcaaccgttttccttacttaaaagctggttcagcctcagtaaatagatgaactgaaaactagtagaggattctatcgaaccctaccctagttggattcaactaccctagataaattttgcatagtaaaaattcaattagaagaggccaaaaagccttttttttctttttaacgctgttttaaacactaacggagtacatggttatttgcatacccagcttagaattttatattgggggttgagagtggaaatgacctaattgagaactcaggtctatttctctatacaaatacccctgtctaccagactggactagaaaagtaactgagctgtagttaactgctgttgagctttaaaaaaattggagtaaacatacttgcatttatattctttgttaattttagctggagttataacaaatttaaaggaaggtcacaacctacctgtaattacaattccataccaccaccacatctgttctgtgcttttattttacgaaaaagctaatggcaaatctacattaaactaagttgaatacaaagtcttagtgaagaaggcctggtggtctcgtttacaaaaatggccagtgtcatatttgggcttaaaatttcaagaagggcacttcaaatggctttgcatttgcatgtttcagtgctagagcgtaggaatagaccctggcgtccactgtgagatgttcttcagctaccagagctgtggaaagcaaagaaaacaacttagatcatgccgttaaggaaggacaaaacatcttattcaatcagtgtttgcgcagcaggtactactatatgtcacttcctatgctagatgctggtgataacgttttttttggtctataaggatcttaaagaataaagactataaaggcaagattacattcctagcatgagacaagaacatcagggataatgattttttttttttttggtgagacagtctcgctctgttgcccaagctagagggcaatggcgtgatctcggctcactgcaacctctgcctcctgggtttaagcgattctcctgcctcagcctccccagtagctgggactataggcgcacgccaccacgcccagctaatttttgtatttttagtagagacggggtttttgccatgttggccaggatggtttcgatctcctgacctcgtgatccacccgcctcagcctcccaaagtgctgggattacaggcgtgagctaccgcacccagccagggatgattttatgtgtgaaaacagcaaagttggaagtgtatagagccaatcgctatacctcatttatagctggggtagggctttgcttttctgaaaccagatggtgatgattatgtaggatcttagggattccatcttttctgctgctaggggatacatatgttcccccggcaagttaaactgtgtgcatgttaggactggagatctactaccaagaatgcggtctcaggaccttattaccacaggctttcattaaaatttgtttcactcagatggaggttgccagatgtaaaatcagcctcttgttttcctaagcccgctttttggggtttttggggggggaaaaaccaaaagggcccccctgggggggggaaccaatttttggccaagggccaagggaaagcattggtcctactcacctgggcacagcaggtgcttggtaactggcagatgctactctttgtagcaaactgatctttttttaattttttttttatgtttttgagatggagtctcactttgtcgccaggctgcagtgcagtgccacgatcttggctcactgcaacctgcgcctcccgggttcaagcgattctcctgccccagcctcctgagtagctgggactaccggcatgtaccaccatgcctggctaatttttgtatttttagtagagatggggttttactatgttggccaggctggtctggagctcctgacctcaagtgatcagcctacctcggcctcccaaagtgctgggattacaggcgtgagccaccgcacccggccagcaaactgatcttaaaatgtaatactttccttccgacttctcaaatgttgctggttgaataaacggtttgattactgtattttgattctgctaaagctaggcaacttggttcttttacccctcctcctttatagccatagtagccctctctccacctcccctcacttattctatttttttctcccttttctaagaccaaaagtgaagttaagaaggtggaagggagaaggaagacattttacaaaaaggatactcttctactaaaagataaccccgcacggcatttcacacttgcctacgtcaccctgctttccacgcacctcctcagagggaggggctgttattgttcctgttttatgaaaaaagccgagagaggctacagaacctgtttgatgtgatagctaattatggtccgcggagcctcaaaccgagtcgggcctgtgactccgagctgcgctgcctcgtattgattgtcatgcctttctccaaatacgcaccagataaactattgtatctattcagtatgattgttctaactctggctttgagctgtcgaggtggcttctaccttaggtctagtttttggaaaggtgaagcaggagtggaagctctctaagggatacgaaatctgattttatccaaagaaatcacagcagcctttgaaagacacattcagattttcaaacaaacaacagacaattcaaaaccaggcgctctgcttattcactgaaaccgtaagctgctgaaactcagggaaaagcttaagaaactggtcttaaagcttcaggccaaacaatgcttcaaatcacatttgaagtaatcacttaaaaacagtagaaaaatcagttatcaattacctaaaacacttatacccaataaaatattcccatgatgacaagtgtctgcttctttctagatgagtgaaagggatttgccagcccatacagaggtgctccttgaagggcccatggtatgtctccatacagtatctcctcgtctccacacagtatctcctcatgtctccatacagtatctcctctcgtggttttatcaaaggacttttctccccataagcttactgtttacaaagtctctaaaagatgggtggccaagaattatacaatgcatctacatgaccagtgatttctaagggccacacagctggtttggtttattatgtgaaaagcatatcacacggagtatacaggaaatacctcaagtatttgttgaaggagcatcatcaatttctccttgaacatacagcctccacaaaggaccatccctcatactagcatacttgaggaaaagctaacagcttatctacccacacctttgcattgctatggactgaaggtttaaagtgtagaatcgttttggctactcagcaggaatgtcatctgggccattctgtaggagaaaaagcctctaccaaaagtttgcacttgacccagaatgctttgctcttattttcaaactctgtgccacccagaaaggaaaattagtagtggtcacctgcagttttacaagttgctaggcatttgactttagtgatacaaaaaagataaagaaatggagttatatttagtacccagtttgctgggatggggacggggagaactggagaaactgggtggcggtctggagaatgcttaccatcaagtctctgcagcaggtcattcttgggtaaagaaatgacttccacaaactctaaacagacaaagtgcaagtgaaaacaaagctaacgtcaagagcctaccaaaacaacccaaaatgtctgcagccatcaccactacactaagtcatacacgctcggccaccaggagttgcagaacatacctccatcccctggaaataaacagaaggaaaacatttcagcaaggcctggagtggtaacatcggaagacttttatacaagaggcgtcaaaaaggctttgagaatttcacagaagcctgggtttctgctaacttaatttatatacattgtcaaactcgagcagtatgaagttattgttctccacataatgttaagtagcaaaatttaaagcatattcgatagtatgtatatttttatagatatgaatctgcgtattatgtaaaatatacagaacatataaaaacttaccttttaaccactatgaaggtacaattcagtagcattaaataacattcaaaaaggtgcacaaccaccaccagtatccatctccagaacttttcatgacacccaacagaaactcgggatccactcaacactaattccccatccctagtagcgcttactctactgtcttcctctatcagtttgtctattctgggcacccagatacgtagaatcagagtatttgcccatcatgttatcgcatgtttcagcgtgtatgtgtgtttgtgtgtataccacactttgtggatgcattcatctgctggcagacacctgggttgtttccacagaggcggccatgaacacaggcacgcaagtatatgagtccctgtttcacttcttctgggtgtagacttaggagatgaaatgccagatcatataataattctgtatctaatatgctgaggaactgccaaacttttccacagtgtctcatatgtatatgtgcagttcaaaaattaagatttattttatttatttatttatttatttatttatttatttatttatttatttattttttggagacagggtctcagtctgttgcccgggctggagtgcagtggtgtgatcttgactcactgcaacctccgcctcctgggttcaagtgattcttgtgtctcagcttcccgagtagctgggattacaggtgcgcaccaccatgcctggctaatttttgtatttttagtagagtcagggtttcaccatgttggccaggctgatctcgagctcctgacctcaagtgatccacccacctcaaccttccaaagtgctgggattacaggcatgagccaccacgcccggcaaaaaataagacttaaaattagttgcagtgggatactgaaacataaatatgaacaactgaagagggtaagaagttaaagaatatcactgatactgatttactgtggtgcacatataaataccccctttaaaaggatgggagagacaacacggaattgacagagacatcacagcttttgaatccaaagttgctaagaaatattatagagcaaagagaaatagtgaataatctgctgcccgttaacaattacttaggccatttttttttttttaagagagacatggtctcattctgtcacagagtggcaccatcatagctcctccaactcctgggcttaagtgatcctcctgcctcaccttccagagcagctgggactacaggggaacttaggccattcttaaaatatacatgaagacagaaaccagggtgatttaagtttctcactgtttactacttaagcctgcagctcatattactaagtgggaatacacttcatatagaaaacagggaaatatgtcatttaacatttttttacaaagaaagcgtaaagatgaatgaagtggcaaaagaaaaatgctaaaatacatgattaggaagagagacaagaatactgatgaagtctatttgaaagaccgattctttccatgaaagactacattcttttaataaatcaaactagcagcaagttccaagacacgtaatgcaaccacaccaccttcatcacagccgacacacacatacctggctttggcttcggccttgcgttttcggcatcatctccgttaatggtgactgtcacgatgtgtatagtacagtttgacaagcctgggtccatacagaccgctgtggagagaagggacagtcagatgcgtcagtccctttggcatttgtttcactatggtcttaggaagaagatgcgtcccgcagctcagcattgacgtggaggtgatgcgggaaaactagttctcacatttggtaggcagatctgcaggctgcaaagcatctgggcactcacactctccccagagctctcgagtcaagcttgctaggtctgcggggttagatggtactgtcaagtcataaaatcccttcaccacatcaaactcaaaaaaatcttccagtgatgagggtagcacatgcatgagatgggtgagcaataaaactcagggggtaggaaattcctaaaggcaattgattttttgagacagagtttcactttgctcttattgcccaggatggagtgcactggcgtgatcttggctcactgcaacctctgcctcctgggttcaattctcctgcctcagcctcccgagtagctgggatcacaggtgtgcgccacccggctaatttttgtatttttagtagagatgggtttcaccatgttggtcaggctggtctcgaactcctgacctcaggtgatccacctgcctcggcctcccaaagtgctgggattacaggcatgagccaccacatccagccaaaaggcaatttaatttcattaattctcccccaacttcaggcccttctggctccagtttcctcctgggaggggagattcccttacacttggtgaccagtcctaatctgtgatttctttctcttcagtgaattctgagcgtaaagaacacccaaataatcaatcccttcccagacggaggaatccatcacttggtgaattttcaagcaataccaacctggagaacattcggcaatgtcccctttgtagccagtttcttcttcaagctcccggagagcagctgcttctggggtttcaccatcatctatgagacctgcaag

SEQ ID NO: 794 - DNA, 1354 bp, Homo sapiens
aaccaatggttccacatagccatgaaatcagctgttacaataggaagaccaccactgaacagttttgtaactcatttcagaattgactttggtatgtgcttattggtgtatttctgtgcttgtgtcaattcaacaaagcttcccaagcaaggttacttcaaacattacttgggccacggtaaaagaaaaataaaattctgttgattcagagtcaccttcaatctcatgtcataaattatgtttctctagtctttgatattgtttcacatgtgcatgattagattggttgaggatagactttgggctcatgatttattgactaattatgtggttttcccactgtagcttgggttaaatcttacaagacaggctgaaaactgaaattgttatgacatttttgttttctctacaccataccaagtaatgctgtttgattgaatcaaatattttctaaagactaaatgtaatccaaaaaatgatctgtaaatgttcccaacaggtgtcccaaaaccatattttagtaagtttttcaattggtccaacagttctataaattttaccttgaggtaactaaaatggaaacataatgaatatattatctctattgtctaaggacaaacaaaacaccgaagttattgagaatcagattcccatgttagcataaatgagtcacctagttttttcaacaaaaccaagtaataaataaatcaacactttcagttttctgccagtgtcacagatggcagccaattggtttgattaaaaatctgatgcttgcatgtttgcatagtaaaagacagggttttcaggaaaaaatcattatacttctcactgtgttccacacaatgttgaaggttatgtccaaatttgaaaaacaaatccaattaaactagctaccatacaaatatatcttttgttattgaaagagtgatttcagtcgtgatttttcattaatctagttttgtaaaaatcagacttcctgtaaaccaattgaaaacctctacattttactatatgtattcatggacttaatttcatcaaaaataccaatattctctgtgccctaacaagtgtaattgcactaaccttgtagttgatatttactgattgaaatgtatatacacaaaaattatgtaaaactgattatctagaggtttcttcattagctagcacaaatagttattgtaaacctttgtcctgtatttttttaaagtctgcaacatggtgaaccagtatgcttgatggctttaatacctgtgtctgcaatttattattcatttgaagcaacaaattcagaattgtttgaaattatgaaggctaaacagcataaatacattgtggtttcttttataaa

SEQ ID NO: 795 - DNA, 788 bp, Homo sapiens
aattgcaggggctcctgagaagaaatggcaaaaataaaaaagagaaagagagagaaaggggaagagaaaaggaaaaaagaaaaatctataacttgaagccctgtaaagcaaagatttaccaaactttagattttataccccctcttttttcagcatatccaaataaatttacatgatcttatgagtgtaaatcttctagtcttcatgagatttttccagcttttctgccttttagattgacatttctagttgcttaaggtttcttcttcaaagcaatgggtataaaacatgtgattattattaaacagttatggaaaataccatctttattccaccactttatcaggtagaacttgaaggtaaaataaagtttggatgctgagtctacatgtattgtattgtattgtattgtattgtattgtattgtattgtattgtattgtattgtattgtatagtggttaccagagatttaataacatagcagaagtaactgaatcgcctcctctgccctatgcacttgtattttttttatttcaaaaatgccaggaagataagtgtatgcaaaaatataaagtttgtaaaattttatacaacttaatctatttgatcattagttaagtaagcttaactaaattaaaaatgtattttattgctactttttttaactctctaaagaatacatttatgtttttgaaggagctttaatttagtaacagttaatctttttattaattttagtaaaaataatcatacccttttaataataaaaattaaactttaagtcttt

SEQ ID NO: 796 - DNA, 1336 bp, Homo sapiens
gccatagccatgtcggcagtaacggccacagggattcctgaaccctgagtgaatagaggcttcgaggcagcagacaaggttctgatcttggcttctccactgctgagccctgtgacctggagcaagttacttaacctctctgagccttgtttcccaactataaagtgcagtgacatttacttttttacattgttgtgaggattaaatacctaacacagtgcccaggacataatagggcccaacacctcaatacctgttagtgtttttttgttttaatttttttgagatgggtcttactctgtcgcccaggctgaagtgcaatggtgcgatcttggctcactgtaacctccgcctcctgggttcaagcagttttcctgactcagcctcccaagaggctgggactacaggtgtgtgccactacccccggctcatttttgtattttttgggtagagacagggtttcaccatgttggccaggctggtcttgaactcctgacctcaagtgatccacctgcctcagccttccaaagtgttgggattataggcgggatagccattgcacctggccctgttagtgtcttctatttgttgagctcttgatcgttcacaaagccccttcataactgttaccccagaaaaattccacccattttgcagatgagaaaactggagctttgagggcactttctcagggtcacaagctagtacgaggcaaagctgagtctcaaaagccttttcccctgactccagagctcccacccactgatgaagcttttcccctgacagagctggggcttgaggtgtgaccctggatgaacctcttctctctctccccgttgtactcatcagttctgccagtaaaaattctcctctatgacctggaaagcggggttgtggcctttctttaggtagtgagttggtgttttgggtttgctttttatttttgaatcagtgacaaataacctttctggctggttgaatggcttcaggttctggaattcttgctttgttctaaatgtcaatagtatagcagaaatattaataataaataatacaatataaataataatagcaaaaacacacaggcagttcaaaaacagagaattaaaatgttatgctaaaaaatatttatttccccactgcttaatttgactggctttgaaaagaaaagtaggctgggcaaggtggctcatgcctgtaacacagcactttgggaggccaaagctggaatattgcttgagcccaggagtttgaggctgcagtgagctatgattgcaccactgtactccagcctgggtgacagattgagaccctgtctcaagaaaaaaaaaaaaaa

SEQ ID NO: 797 - DNA, 1215 bp, Homo sapiens
gtatttctcctaatgctatccctcccccagccctcaccccatgacaggccctggtgtgtgatgttccccgtcctgtgtccaagtgttctcattgttcatttcccacccatgagtgagaacatgctcgcaccgccgcttctaaatgttttaaaaacaaagacaccaatgcccttcattggggaaatgaaagacttttaagtaaaacgattttgagtgaaataatatttgttgttttaaaaagttaatattaaccactctccatcatatgttgaaattatcttaagatgtgaaagttaaaattagaaaccttgtaaaggaaaaataggaaatagtttcatgaacttgacacaggaaaatatttcttagactagatactgtagcactcaccacaataagaaatcaagcgaattgcacttcatttttaaaaagcttctccttattatgttgttgtttaacaacttaaatgctatctctagaccaggaataattatttgctatatattacagcaaaaaatatgtatgtataaatggactcattcaaaatatataaagaactcctattacaaagaaattgacaaacagcccagtatatcaatgaatataaaaatttgagaagatattttccataagaagatatctaaatgaacattaggcatgagaaaaccaaattttaggatatcactacacacctggcatagtttaaaagactgaaaatattaagtgtgtgggaatgtagagcaactggaaatggcctacatctttcatagaaatgtaaaacaatacaaatactttgcaaaactctgtccaacattttctacccattcaccaagcaactccatccctagctatagatacccaggaaaataagtatgtatcttcacagaaataattgtatgagaatattcatagttacttatgcacagtagttatcaagtaaacctgtctcccatcagaaaaatggatatcaaattgtgtgataatcatacaatcaataggatattacttggccaaaacaaaatgaaacaagggaaaaacacaatcaaacaaattagtggcatatatacccacctgagtaaagagaagtcggccaggcgcggtggctcacgcctgtaatcccagcactttgggaggctgaggcggcagatcacgaggtcaggagatcgagaccatcgtggctaacacagtgaaaccccgtctctactaaaaatacaaaaa

SEQ ID NO: 798 - DNA, 1310 bp, Homo sapiens
cacgtgtatatatattatatatatatacgtgtgccatgttggtttgctgcacccattaactcgtcatttacattaggtatttctcctaatgctatccctcccccagccctcaccccatgacaggccctggtgtgtgatgttccccgtcctgtgtccaagtgttctcattgttcatttcccacccatgagtgagaacatgctcgcaccgccgcttctaaatgttttaaaaacaaagacaccaatgcccttcattggggaaatgaaagacttttaagtaaaacgattttgagtgaaataatatttgttgttttaaaaagttaatattaaccactctccatcatatgttgaaattatcttaagatgtgaaagttaaaattagaaaccttgtaaaggaaaaataggaaatagtttcatgaacttgacacaggaaaatatttcttagactagatactgtagcactcaccacaataagaaatcaagcgaattgcacttcatttttaaaaagcttctccttattatgttgttgtttaacaacttaaacgctatctctagaccaggaataattatttgctatatattacagcaaaaaatatgtatgtataaatggactcattcaaaatatataaagaactcctattacaaagaaattgacaaacagcccagtatatcaatgaatataaaaatttgagaagatattttccataagaagatatctaaatgaacattaggcatgagaaaaccaaattttaggatatcactacacacctggcatagtttaaaagactgaaaatattaagtgtgtgggaatgtagagcaactggaaatggcctacatctttcatagaaatgtaaaacaatacaaatactttgcaaaactctgtccaacattttctacccattcaccaagcaactccatccctagctatagatacccaggaaaataagtatgtatcttcacagaaataattgtatgagaatattcatagttacttatgcacagtagttatcaagtaaacctgtctcccatcagaaaaatggatatcaaattgtgtgataatcatacaatcaataggatattacttggccaaaacaaaatgaaacaagggaaaaacacaatcaaacaaattagtggcatatatacccacctgagtaaagagaagtcggccgggcgcggtggctcacgcctgtaatcccagcactttgggaggctgaggcggcagatcacgaggtcaggagatcgagaccatcgtggctaacacagtgaaaccccgtctctactaaaaatacaaaaaaaaaaaaaaaaaaaaaaaa

SEQ ID NO: 799 - DNA, 1179 bp, Homo sapiens
cacgtgtatatatattatatatatatacgtgtgccatgttggtttgctgcacccattaactcgtcatttacattaggtatttctactaatgctatccctcccccagccctcaccccatgacaggccctggtgtgtgatgttccccgtcctgtgtccaagtgttctcattgttcagttcccacccatgagtgagaacatgctcgcaccgccgcttctaaatgttttaaaaacaaagacaccaatgcccttcattggggaaatgaaagacttttaagtaaaacgattttgagtgaaaataatatttgttgttttaaaaagttaatattaaccactctccatcatatgttggaattatctttaagatgtgaaagttaaaattagaaaccttgtaaaggaaaaataggaaatagtttcatgaacttgacacaggaaaatatttcttagactagatactgtagcactcaccacaataagaaatcaagcgaattgcacttcatttttaaaaagcttctccttattatgttgttgtttaacaacttaaacgctatctctagaccaggaataattatttgctatataatacagcaaaaaatatgtatgtataaatggactcattcaaaatatataaagaactcctattacaaagaaattgacaaacagcccagtatatcaatgaatataaaaatttgagaagatattttccataagaagatatctaaatgaacattaggcatgagaaaaccaaattttatgatatcactacacacctggcatagtttaaaagactgaaaatattaagtgtgtgggaatgtagagcaactggaaatggcctacatctttcatagaaatgtaaagcaatacaaatactttgcaaaactctgtccaacattttctacccattcaccaagcaactccatccctagctatagatacccaggaaaataagtatgtatcttcacagaaataattgtatgagaatattcatagttacttatgcacagtagttatcaagtaaacctgtctcccatcagaaaaatggatataaaattgtgtgataatcatacaatcaataggatattacttgggcaaaacaaaatgaaacaatggcaaaacacaattcaacaaaattagtggcatatattacccacctgagttaaagagaagtctgccgggcgcggt

SEQ ID NO: 800 - DNA, 1635 bp, Homo sapiens
cacgtgtatatatattatatatatatacacacgtgtgccatgttggtttgctgcacccattaactcgtcatttacactaggtatatatcctaatgctatccctcccccagccctcaccccatgacaggccctggtgtgtgatgttccccgccctgtgtccaagtgttctcattgttcaattcccacccatgagtgagaacatgctcgcaccgccgcttctaaatgttttaaaaacaaagacaccaatgcccttcattggggaaatgaaagacttttaagtaaaacgattttgagtgaaataatatttgttgttttaaacagttaatattaaccactctccatcatatattgaaattaacttaagatgtgaaagttaaaattagaaaccttgtaaaggaaaaataggaaatagtttcatgaacttgacacaggaaaatatttcttagactagatactgtagcactcaccacaataagaaatcaagcgaattgcacttcatttttaaaaagcttctccttattatgttgttgtttaacaacttaaacgctatctctagaccaggaataattatttgctatataatacagcaaaaaatatgtatgtataaatggactcattcaaaatatataaagaactcctattacaaagaaattgacaaacagcccagtatatcaatgaatataaaaatttgagaagatattttccataagaagatatctaaatgaacattaggcatgagaaaaccaaattttaggatatcactacacacctggcatagtttaaaagactgaaaatattaagtgtgtgggaatgtagagcaactggaaatggcctacatctttcatagaaatgtaaaacaatacaaatactttgcaaaactctgtccaacattttctacccattcaccaagcaactccatccctagctatagatacccaggaaaataagtatgtatcttcacagaaataattgtatgagaatattcatagttacttatgcacagtagttatcaagtaaacctgtctcccatcagaaaaatggatatcaaattgtgtgataatcatacaatcaataggatattacttggccaaaacaaaatgaaacaagggaaaaacacaatcaaacaaattagtggcatatattcccacctgagtaaagagaagtcggccgtgtgcggtggctcacgcctgtaatcccagcactttgggaggccgaggcggcagatcacgaggtcaggagatcgagaccatcctggctaacacagtgaaaccccgtctctactaaaaatacaaaaaaaaaaaaaagaaaaattagccgggcgtggtggcgggcgcctgtattcccagctacttgggagtctgaggcaggagaatagcgtgaacctgggaggcagagcttgcagtgagcctagatcgcgtcactgcactccagcctgggcgacagagtgagactctgtctcaaaaaaaaaaaaaaaaaaagtcaaaacaagagaacatactaaatgattccatttttttatttatgacttcatgactaccattaagaaaatataacctgttgggaaactgtttctgccttgatgatgttgtacagacaagagataaacagtgaggaatatgcttagatgtattggga

SEQ ID NO: 801 - DNA, 5403 bp, Homo sapiens
cacgtgtatatatattatatatatatacgtgtgccatgttggtttgctgcacccattaactcgtcatttacattaggtatttctcctaatgctatccctcccccagccctcaccccatgacaggccctggtgtgtgatgttccccgtcctgtgtccaagtgttctcattgttcagttcccacccatgagtgagaacatgctcgcaccgccgcttctaaatgttttaaaaacaaagacaccaatgcccttcattggggaaatgaaagacttttaagtaaaacgattttgagtgaaataatatttgttgttttaaaaagttaatattaaccactctccatcatatgttgaaattatcttaagatgtgaaagttaaaattagaaaccttgtaaaggaaaaataggaaatagtttcatgaacttgacacaggaaaatatttcttagactagatactgtagcactcaccacaataagaaatcaagcgaattgcacttcatttttaaaaagcttctccttattatgttgttgtttaacaacttaaacgctatctctagaccaggaataattatttgctatataatacagcaaaaaatatgtatgtataaatggactcattcaaaatatataaagaactcctattacaaagaaattgacaaacagcccagtatatcaatgaatataaaaatttgagaagatattttccataagaagatatctaaatgaacattaggcatgagaaaaccaaattttatgatatcactacacacctggcatagtttaaaagactgaaaatattaagtgtgtgggaatgtagagcaactggaaatggcctacatctttcatagaaatgtaaagcaatacaaatactttgcaaaactctgtccaacattttctacccattcaccaagcaactccatccctagctatagatacccaggaaaataagtatgtatcttcacagaaataattgtatgagaatattcatagttacttatgcacagtagttatcaagtaaacctgtctcccatcagaaaaatggatataaaattgtgtgataatcatacaatcaataggatattacttggccaaaacaaaatgaaacaagggaaaaacacaatcaaacaaattagtggcatatatacccacctgagtaaagagaagtcggccgggcgcggtggctcacgcctgtaatcccagtactttgggaggccgaggcggcagatcacgaggtcaggagatcgagaccatcgtggctaacacagtgaaaccccgtctctactaaaaatacaaaaaaaaaaaaaaaaaaaaaaattagccgggcgtggtggcgggtgcctgtattcccagctacttgggagtctgaggcaggagaatagcgtgaacctgggaggcagagcttgcagtgagcctagatcgcgtcactgcactccagcctgggcgacagagtgagactctgtctccaaaaaaaaaaaaagaaaaagtcaaaacaagagaacatactaaatgattccatttttttatttatgacttcatgactaccattaagaaaatataacctgttgggaaactgtttctgccttgatgatgttgtacagacaagagataaacagtgaggaatatgcttagatgtattgggaaagacacgggtctgtggcattgtcacaagggtacacgaatactgagagtgaatgctgaaggaatgatccccattggtggtgaccctcaggtgagactagggtgcctgtgtttcagcaaagcctgggcaattggaatgcagggctcctaagattccatgacacccccaccttctaattctgttattgcaactgcagacggttacctggcacgctggccacaatctacctcactcttatcagagtctgagctactggcagtgctttcagctctgagttgaggcaccttgaaccttgtttttgtggtgaaggatcctaaagtgctgtggggagtgatcacatttttcacaacagtaaggtaagaatttcagttactgacatccctcagtcctgattaaacctatttgatttcaccagtttttaacccatcatatgtttgggtttcttctccccagtccctgactccacctcttctgccacaaacgtcagcatggtggtatcagccggcccttggtccagcgagaaggcagagatgaacattctagaaatcaacgagaaattgcgcccccagttggcagagaacaaacagcagttcggaaacctcaaagagagatgttttgtaactcaactggccggcttcctggccaaccagcagaagaaatacagtaagatctataggctcaccatcatgaaagtgatgaatgatgtcctgtcttctgagacactaaatgctctctccatcaaaaataatttcatccttcttgtacttgtaggaaaacagaaatgggtattttaacattttgttagttggaagacagaggtaccaaagtatttagcaactttccatgtttgcaatcagatgggggtgggactagagttaaactgccatttattgatttctaacacaggcacagaacgacctgttttctccaagaggctcaatcatgttttcaagaatcctctctgtaccatataagatcctgcagacaaataacatgtagtctgttgttctaaatgtctaggactagtgaacttttattcagttcaagtttctgttgaggcccaacaggcaaagctgtgttctagtgactctgagggaaacttggtgatagtagccagtacctgctctgaggggcttcaagaggagtctgctcctaatagaacctgtgctatctataagtgacagcatcaagagcagggagtaggggccgtgcaacgtggctcactcctgtaatctcagcactttgggaggctgaggcgggcagagcacgaggtcaggagtttgagactagcctgggcaacatggagaaaccccatctccactaaaaatacaaaaagtagatgggcgtcgtggtgggcaactgtaatcaccactaatcgggtggctgaggcagaagaatcctttgaacccagcaggcagatgttgcagtgagccaagattgcactattgcactccagcatgggtgacagggcaagactcgtcaaaaaacaaacaaaaagataaataaatcaaaaataaaaataaaaagcagagagtagcttggtgagagcgaagtcctgtttcctggtgcacaggctcttgttcctaaagaggaagaaagatcacacccgagaatgtgtggaagcagcagtgcagtgtgcaaagcagggaccctcagcctgtctcctgggctccatccatgttgcttgtcttgtctgtccctcagtttcctcatctgttcagagggtactacaataatacctacctctgtaaattgctgcaatgaattacatgaggcatttcctgtcaatctccttgaacattaattggcacagtgtaaacactatctattagttcttcattctgatgtttctaaattaacacaaactaatcttatgctgtttctaaattaacacaactaatctaaatcttaatgctgcctctcatactaataaagtatttgggcatatttccttcatggccttattgtcttatgtctcacactttatgcttcagatatgattcttaaaaccatatctgaatattgatttaaaaatgaaatatttttaaagtccttgacatatttgtccttgaaatacccagtaaaagggaaaccatcagtcccatagtcctaggggccttcccgactgtacaagaaatcactacttcatgccccagtgcagtgttttagaggagaggctgcaaggcttgggaaagtggccccgcattcagagtcagacctcaggggctgtgagttctgactccgcttcgttgtggttgaatcatcttgtcaacttccttgacgcgcccttgagtttctctttcttcatctttaaattttggaggatcagatgccagaaagtcaggagactgaagagtaaagatgtggaaatccctgtctagaccctggtactggggagagttttgtccttgggatggacctggctcctgccctgtaggcagtgaccacagcagcatgtccagccttccactgaggcaggcgtgtctgtcttttctcagactatgaagagtgtaaagacctcataaaatttatgctgaggaatgagcgacagttcaaggaggagaagcttgcagagcagctcaagcaagctgaggagctcaggtgaggggaccccgtagggggaggcaggcgggtaggtgtgtagatctctgaagtacagcagctcggcggggagaaataagaacgaagctgggccaggggaagggcagaaattgccatggcaggctcatgacacacaaatatttatcagagaacaaggataataataagttctgtgttgcagttgtttcttagagccttgttttctctttttcaaacaagtaattgttgatgtgaaatttacataacacaaaattcaccaaaggagtgggaaccacccagcagcattcagtataatcaaaatggtgtgctatcgccaccccacttacccttagtgagaatcaccttctgactgactgcgtcttctcattctttcactcaatcaatgttgccttctcgaccctgtcattcttttcttctttcatcttttcatttcgccccatctgcacctggcctcatttctgtacatggctttgtatctagtggccgcaagatgcactatgtgtattttcacatggaaatgtccatggccagagtgaggaactgaaaggatgtctttttgaaacggaattaggaagacacctacttttgtttacagaagggaaagatgaatggaacatcatcgaggatcttgcaggagccctctctgatacagggaaagcctgtagaccattttctgttctttctcttggccacagacattcctttcaacatgtgctgaccttctgctcgaaggtctccttgagaacattgtctcagaaatctctgttgcaatatttgaacggatcactcaaccctttctactcttaaattttctctaccgtctcaccttaggcaatataaagtcctggttcactctcaggaacgagagctgacccagttaagggagaagttacgggaagggagagatgcctcccgctcattgaatgagcatctccaggccctcctcactctggatgagccggacaagtcccaggggcaggacctccaagaacagctggctgaggggtgtagactggcacagcaccttgtccaaaagctcagcccaggtaaggtggccataggccctgatgacccaaaaccccaggcttatgagaggctccagacctccatactttcacaatgacagttgtatcactggggtttttttctactacacatatgtggccat

SEQ ID NO: 802 - DNA, 1636 bp, Homo sapiens
cacgtgtatatatattatatatatatatacacgtgtgccatgttggtttgctgcacccattaactcgtcatttacaccaggtatatatcctaatgctatccctcccccagccctcaccccatgacaggccctggtgtgtgatgttccccgccctgtgtccaagtgttctcattgttcaattcccacccatgagtgagaacatgctcgcaccgccgcttctaaatgttttaaaaacaaagacaccaatgcccttcattggggaaatgaaagacttttaagtaaaacgattttgagtgaaataatatttgttgttttaaaaagttaatattaaccactctccatcatatattgaaattaacttaagatgtgaaagttaaaattagaaaccttgtaaaggaaaaataggaaatagtttcatgaacttgacacaggaaaatatttcttagactagatactgtagcactcaccacaataagaaatcaagcgaattgcacttcatttttaaaaagcttctccttattatgttgttgtttaacaacttaaacgctatctctagaccaggaataattatttgctatataatacagcaaaaaatatgtatgtataaatggactcattcaaaatatataaagaactcctattacaaagaaattgacaaacagcccagtatatcaatgaatataaaaatttgagaagatattttccataagaagatatctaaatgaacattaggcatgagaaaaccaaattttaggatatcactacacacctggcatagtttaaaagactgaaaatattaagtgtgtgggaatgtagagcaactggaaatggcctacatctttcatagaaatgtaaaacaatacaaatactttgcaaaactctgtccaacattttctacccattcaccaagcaactccatccctagctatagatacccaggaaaataagtatgtatcttcacagaaataattgtatgagaatattcatagttacttatgcacagtagttatcaagtaaacctgtctcccatcagaaaaatggatataaaattgtgtgataatcatacaatcaataggatattacttggccaaaacaaaatgaaacaagggaaaaacacaatcaaacaaattagtggcatatatacccacctgagtaaagagaagtcggccgtgtgcggtggctcacgcctgtaatcccagcactttgggaggccgaggcggcagatcacgaggtcaggagatcgagaccatcctggctaacacagtgaaaccccgtctctactaaaaatacaaaaaaaaaaaaaagaaaaattagccgggcgtggtggcgggcgcctgtattcccagctacttgggagtctgaggcaggagaatagcgtgaacctgggaggcagagcttgcagtgagcctagatcgcgtcactgcactccagcctgggcgacagagtgagactctgtctcaaaaaaaaaaaaaaaaaaaagtcaaaacaagagaacatactaaatgattccatttttttatttatgacttcatgactaccattaagaaaatataacctgttgggaaactgtttctgccttgatgatgttgtacagacaagagataaacagtgaggaatatgcttagatgtattggga

SEQ ID NO: 803 - DNA, 1301 bp, Homo sapiens
atatattatatatatatatacgtgtgccatgttggtttgctgcacccattaactcgtcatttacattaggtatttctcctaatgctatccctcccccagccctcaccccatgacaggccctggtgtgtgatgttccccgtcctgtgtccaagtgttctcattgttcagttcccacccatgagtgagaacatgcttgcaccgccgcttctaaatgttttaaaaacagacaccaatgcccttcattggggaaatgaaagacttttaagtaaaacgattttgagtgaaataatatttgttgttttaaaaagttaatattaaccactctccatcatatgttgaaattatcttaagatgtgaaagttaaaattagaaaccttgtaaaggaaaaataggaaatagtttcatgaacttgacacaggaaaatatttcttagactagatactgtagcactcaccacaataagaaatcaagcgaattgcacttcatttttaaaaagcttctccttattatgttgttgtttaacaacttaaacgctatctctagaccaggaataattatttgctatataatacagcaaaaaatatgtatgtataaatggactcattcaaaatatataaagaactcctattacaaagaaattgacaaacagcccagtatatcaatgaatataaaaatttgagaagatattttccataagaagatatctaaatgaacattaggcatgagaaaaccaaattttaggatatcactacacacctggcatagtttaaaagactgaaaatattaagtgtgtgggaatgtagagcaactggaaatggcctacatctttcatagaaatgtaaaacaatacaaatactttgcaaaactctgtccaacattttctacccattcaccaagcaactccatccctagctatagatacccaggaaaataagtatgtatcttcacagaaataattgtatgagaatattcatagttacttatgcacagtagttatcaagtaaacctgtctcccatcagaaaaatggatatcaaattgtgtgataatcatacaatcaataggatattacttggccaaaacaaaatgaaacaagggaaaaacacaatcaaacaaattagtggcatatatacccacttgagtaaagagaagtcggccgggcgcagtggctcacgcctgtaatcccagcactttgggaggccgaggcggcagatcacgaggtcaggagatcgagaccatcgtggctaacacagtgaaaccccgtctctactaaaaatacaaaaaaagaaaaaaaaaaagaaaa

SEQ ID NO: 804 - DNA, 7109 bp, Homo sapiens
tgaatatgagcacagacttggggatattagtgtcacctagcgttattagctagtattctccttttgtttccccataacatcccctcctccttcccacagatccactttccactcatttccatcctgtcttacgccacttggggcttgtcccttctagaatgcatccctggctcccctgtgtgcacacttctagttaggtttagcaatgtgggcacccgatggagcctggaagtgagaggaaggtgaggtccgtatttcttccctctccctccctgctctggcactgagtatctgacaatagctgcatctgtctattacttcagtggccactcttccacagccccaattctcagtgggtcccatagcattatttacctttgttcctttagctcccaccaaggaagacccagaggcattctcctcaccaaggcattaagaaatgcatgggtgaggggaacagcggcgtgcatgtaaaggtcctgtggcgcctctcctctacaggctggaggtcatggcgggagatgctgcatggatttgccctccctgctgtcagaacaacagggttctggaagagtagaggacaggccgtgggacttggctgtctagagacaaggcgggagggatttccttgagaggcagggacatgtggtggttactaatcattgtgaggtgtctgggatgtaatggatgggaaatctactaagaagtcaacttatgtaataattagaaaagctctagttctgaggacagagacctgttggagtcaccatagtggaaatttatgacctggtatccagttcagatacctggagcttcttgactggggggagattggatcccttggggaagagtgaagccttcaatgctgccacaagtgtgatccgcccgcctcagcctcccaaagtgctgggattacaggcgtgagccaccatgcccggcctcttttttatatttaaaaaatatcattttatatattaccagggcaaaagagaaaactcgtatgattacgtggtcatacacagtaaaagcatttggcaaaattgaaaacttttttcatgatttataaaaacaaaccccagaaaatgctcagcatgatgagaacagaaggcaacacttccaaccccattaagggcagatttgaagaacccacaggtaacattatattaaatggcataagattgaatgcttttctattaaatcagagaaaaaagtagaatacctgctgttactcttttaattcagcattatactagagctctaagtcaatgcaataaagtaagaaaaattaataaagtattgaaaagaaagaattgaagctgtctttattcacagataatgactgtgtttgttaacaatgctagaaatctacaaaaatctaccagaactaatcagtgagtttggtagtgttgcagaatgtaagctctcaatgtaagtggtcttttgtatttctgtatattagcaatgagcatttggaaaatgaaataagaatacaatttcatttaaagtaacatctaaatacatgttgtgcttataaataaattcaacagactgggcaccatggctcacacttgtaatctcagcactttgggaagccgaggtgggcagatcatgaggtcaggagatggagaccatcatgcctaacacagtgaaaccccatctctactaaaaatacaaaaaattagctaggcgtggtggcatgtgcctgtagtccagctacttgggaggctgaggcaggaggatcacttgaacctgggaggcagaggttacagtgagccgagatcgcatcactgcactccagcctgggtaacagagcaagactctgtctcaaaaaaaaaaaaaaaaaaaaaaaaaaaaaaaaaaaaaaaaaaaggaaagtcaacaaaatttatgtaaggccagtacaccaaaaactacaaaaaattgctttgagaaattatgaaagaactaaattagtggggagataaaccttgtcatggatcagaagagttgttatgtttaaagagtcagttcttcgtaaattgatctccagatccaatgcaattctaataaaaattccaagtggcattttggtagaaattttcaagctgattctaccatttatatggtaatgtcaatgatcaagaataataaaatagcaatattataaaagaataatggtgaatgaattcactacctatttccagaattactctacagctatgaaaatcaagattatgtgttttgttgaaaaaaaaaaatagaatatatatcagtggaagagaagagagaatccagaaatagatactcacatgtatgtctaattgattcttaggacatatatatatgtatacacacccccccacacacacacacaaacatgtgtgtgtgtgtgtgtgtgtatatatatatatatattcaccgttttgaagattatcatctccaaatagggaatatatatatatatatatacacacacacacatatatatattgcagtctgataagataaacagcacaatgaaacaatttctcaaaagacttgaatagatacttcagaaaagaagatacatgaatggtcaattagcataggaaaagatgctccactgtttagtcatcagggagatcaatcagtgcaacaatgagataccagtacatatccataagaatggctaaaattaaaaaggctgaaaatagcacatgttggtgaggatataaagcacttggaagtcttatacttgtaggaatgaaaaatggtattgctcctttgaaaatctaacagtttcttaaaggttaaacataacacaaatcagatagacagtcattccattcctaggaatttacacactgtgtctgcacaatgatctgtatgtgtgtttccagaccaacctgaggggcgggctgctatttctcgtggctcagtaacgagacacagatgaactggggaggaagagagttttgacttctgcaactggttacagggaaacggcctggaaattatcaccagaccaactcaaaattggaaagttttcctgagctaatgtaccttctaagctatatgtgtatgtggaagtgtgcattcatctaaatacataagtgattaacttcttttaatctataactaagtctgagtcctaaagaccttcctctggaacctcagttaaattcacttaatctaaatgggtctaggtgctgggggcccttatcttgtctcctgctaaatcacagaggtttggagagtcccttcagatctccaataaacttgtctgtggaggcctggggagtttcttcagacccccagtaaaactcgtttaatactaaatggctcctgttaagaatgccttcgttatttcgtcatgctttaaggcccaggaaaaacctaggcaaaactcttggtgggcttttgttacattccagcctttgtataagggcactggcttcttttttttttttttttcctcttaatatttaattgaaccactcagtcgctactgaaacagtttttagggaggcctgtgttagtgagacctggcctgctacgtatggatgctcatgatagtttcttcataatagcccaaacgtggaatgatagaaatgtccaataataagtgaaagtacaaacatacatggtatagccacatgaaggaatactactcagtatttacaagacattacagatggattttaaaattacattgatgcatgaaagaaggcagacacaaaagaacacaggtatcatttcatttatagaaaatggttaaaaatgcaaacggacctgaagtgacagtggctccttggggctgagggttgaaaggctgatgaactgcaaaggggtacaagaaacttttgggcatagggaatttcctctatcttggttgtggcagtagttccgttagtgcatccatttgtaaacgtgcattgaattacacattttaaagtggtgcagtctgttgtaccgaaattatgcctttataaagttgatttcatcatcttaatttctccatactagcaattagcagctagaaaatgaaattcaataaaacataatagagattaatagccagaatcattacatgcttaacaatacatgcaatgaagcaggtacgaggcccctaaaagcaattggtgagaaaaattaaagaaggctaaataaatatatatcatgttcattgattggaagactcaattttgttagcatattacatcaacacaattctgattaatatttctagtaggagattttagagaaatttgaaagctagtttcaaaatgtatttgaaaatcaaagaacctagaataagcaagtcggtcttgaagaagcaataagttggaggacttgctctgctagatttcaaacctgattttaaagctacagtaatttaaaaacagtagtaatggtgtaagtattcataaatatatcaaagcaaaagaatacagattcaaacaatatgcccacatatgtacagttattgattttttttagtagaatcttttttattcataaaaaatccatcaaaacaaaaaagttttccagccacacacaggaggggtatgggtgggggaaggtgtctgtccatctatccctggcccccagcccatgtggttttggcagcaataaggtgtgtggggtaatgactcctgaaattaaaatggtgtgtgtatgtgaaggaaaggcgggcaaagctgtggggagcggtggagtggaaggaacaaaggaggtcagtactgggaacgctgaaggtgggaggccatttcataacattacttgttgatgaaattgccatggataccttctttgcccatcagcaggcctagcgtcttggcagtcatggtgacaatgacgttgaaggtgggggctccaccgatgctcttcatacaaagatccgtggtcaattccccatcctgcagcagtgagtccaggaccacagtatatttctggccccccagtgtcagcccattcatgacaaagcttgaccagtctttgccaaccaggacaccaacctcagctggcgtgatgttgaggaaggttttccctgggacggtggcacagatggaaggtgggtccttgttgcccacaatggccgtgtcctaacaggtcccgtccgccacgaggctgtagatggaggtgtccacctggcctttgcgttgctgcaggggctcctctggtcgctgctgctggggccgcctgggctggcgggttggggaggcggagagctcgatgcaggtgctgtcctcctcgccacgactctgctagctgtgcagtagccctcgctccgccacttaaaaaagaaaaaatatatatataatatatatatacacgtgttatatatattgtatattatgtatatacacgtattatatatatacacgtatgtatatacacgtatatataatatatattcgtgtgtgtatatatattttatatatacgtgtatacatgtatatatgtgtatatatatataatatatatacatgtgtatatataaataatacatatacacgtgtatatatattatatatatatatacacgtgtgccatgttggtttgctgcacccattaactcgtcatttacaccaggtatatatcctaatgctatccctcccccagccctcaccccatgacaggccctggtgtgtgatgttccccgccctgtgtccaagtgttctcattgttcaattcccacccatgagtgagaacatgctcgcaccgccgcttctaaatgttttaaaaacaaagacaccaatgcccttcattggggaaatgaaagacttttaagtaaaacgattttgagtgaaataatatttgttgttttaaaaagttaatattaaccactctccatcatatattgaaattaacttaagatgtgaaagttaaaattagaaaccttgtaaaggaaaaataggaaatagtttcatgaacttgacacaggaaaatatttcttagactagatactgtagcactcaccacaataagaaatcaagcgaattgcacttcatttttaaaaagcttctccttattatgttgttgtttaacaacttaaacgctatctctagaccaggaataattatttgctatataatacagcaaaaaatatgtatgtataaatggactcattcaaaatatataaagaactcctattacaaagaaattgacaaacagcccagtatatcaatgaatataaaaatttgagaagatattttccataagaagatatctaaatgaacattaggcatgagaaaaccaaattttaggatatcactacacacctggcatagtttaaaagactgaaaatattaagtgtgtgggaatgtagagcaactggaaatggcctacatctttcatagaaatgtaaaacaatacaaatactttgcaaaactctgtccaacattttctacccattcaccaagcaactccatccctagctatagatacccaggaaaataagtatgtatcttcacagaaataattgtatgagaatattcatagttacttatgcacagtagttatcaagtaaacctgtctcccatcagaaaaatggatataaaattgtgtgataatcatacaatcaataggatattacttggccaaaacaaaatgaaacaagggaaaaacacaatcaaacaaattagtggcatatatacccacctgagtaaagagaagtcggccgtgtgcggtggctcacgcctgtaatcccagcactttgggaggccgaggcggcagatcacgaggtcaggagatcgagaccatcctggctaacacagtgaaaccccgtctctactaaaaatacaaaaaaaaaaaaaagaaaaattagccgggcgtggtggcgggcgcctgtattcccagctacttgggagtctgaggcaggagaatagcgtgaacctgggaggcagagcttgcagtgagcctagatcgcgtcactgcactccagcctgggcgacagagtgagactctgtctcaaaaaaaaaaaaaaaaaaaagtcaaaacaagagaacatactaaatgattccatttttttatttatgacttcatgactaccattaagaaaatataacctgttgggaaactgtttctgccttgatgatgttgtacagacaagagataaacagtgaggaatatgcttagatgtattggga

SEQ ID NO: 805 - DNA, 2152 bp, Homo sapiens
gaccttcctctggaacctcagttaaattcacttaatctaagtgggtctaggtgctgggggcccttatcttgtctcctgctaaatcacagaggtttggagagtcccttcagatctccaataaacttgtttgtggaggcctggggagtttcttcagacccccagtaaaactcgtttaatactaaatggctcctgttaagaatgccttcgttatttcgtcatgctttaaggcccaggaaaaacctaggcaaaactcttggtgggcttttgttacattccagcctttgtataagggcactggcttctttttttttttcctcttaatatttaattgaaccactcagtcgctactgaaacagttgttagggaggcctgtgttagtgagacctggcctgctacgtatggatgctcatgatagtttcttcataatagcccaaacgcggaatgatagaaatgtccaataataagtgaaagtacaaacatacatggtatagccacatgaaggaatactactcagtctttacaagacattacagatggattttaaaattacattgatgcatgaaagaaggcagacacaaaagaacacaggtatcatttcatttgtagaaaatggttaaaaatgcaaacggacctgaagtgacagtggctccttggggctgagggttgaaaggctgatgaactgcaaaggggtacaagaaactttggggcatagggaatttcctctatcttggttgtggcagtagttccgttagtgcatccatttgtaaacgtgcattgaattacacttttaaagtggtgcagtctgttgtaccgaaattatgcctttataaagttgatttcatcatcttaatttctccatactagcaattagcagctagaaaatgaaattcaataaaacataatagagattaatagccagaatcattacatgcttaacaacacatgcaatgaagcaggtacgaggcccctaaaagcaattggtgagaaaaattaaagaaggctaaataaatatatatcatgttcattgattggaagactcaattttgttagcatattacatcaacacaattctgattaatatttctagtaggagattttagagaaatttgaaagctagtttcaaaatgtatttgaaaatcaaagaacctagaataagcaagtcggtcttgaagaagcaataagttggaggacttgctctgctagatttcaaacctgattttaaagctacagtaatttaaaaacagtagtaatggtgtaagtattcataaatatatcaaagtaaaagaatacagattcaaacaatatgcccacatatgtacagttattgattttttttagtagaatcttttttattcataaaaaatccatcaaaacaaaaaagttttccagccacacacaggaggggtatgggtgggggaaggtgtctgtccatctatccctggcccccagcccatgtggttttggcagcaataaggtgtgtggggtaatgactcctgaaattaaaatggtgtgtgtatgtgaaggaaaggcgggcaaagctgtggggagcggtggagtggaaggaacaaaggaggtcagtactgggaacgctgaaggtgggaggccatttcataacattacttgttgatgaaattgccatggataccttctttgcccatcagcaggcctagcgtcttggcagtcatggtgacaatgacgttgaaggtgggggctccactgatgctcttcatacaaagatccgtggtcaattccccatcctgcagcagtgagtccaggaccacagtatatttctggccccccagtgtcagcccattcatgacaaagcttgaccagtctttgccaaccagggcaccaacctcagctggcgtgatgttgaggaaggttttccctgggacggtggcacagatggaaggtgggtccttgttgcccacaatggccgtgtcctaacaggtcccgtccgccacgaggctgtagatggaggtgtccacctggcctttgcgttgctgcaggggctcctctggtcgctgctgctggggccgcctgggctggcaggtgggggaggcggagagctcgatgcaggtgctgtcctcctcgccacgactctgctagctgtgcagtagccctcgctccgccacttaaaaaagaaaaaaaa

SEQ ID NO: 806 - DNA, 292 bp, Homo sapiens
caccaacctcagctggcgtgatgttgaggaaggttttccctgggacggcggcccagatggaaggtgggtccttgttgcccacaatggccgtgtcctaacaggtcccgtccgccacgaggctgtagatggaggtgtccacctggccgttgcgttgctgcaggggctcttctggtcactgctgctggggccgcctgggctggcgggtgggggaggcggagagctcgatgcaggtgctgtcctcctcgccacgactctgctagctgtgcagtagccctcgctccgccacttaaaa

SEQ ID NO: 807 - DNA, 711 bp, Homo sapiens
gccaagattgcaccattgcactccagcctgggtgacagagcaagactttgtatcaaaatacataaataaataaataaataataaaaaagacttccctgatcgaaatttaaatcaatttccccttctaattctaaagcagcctccaagatcctatagggtttgggagaaaatttgacttaattgtccaaacttttagcccgaatattctgatttttatcaattaattcacatgtggtgtaagaaggcagggccactaaatggttgaaaagggcgaattggaataattctttagaggatttttaaaaacagactaaagcagacaatgaaagggtctgcattttggccaaatacctccatgttgccattccccaggttgttcccaaaaatgtagattggagaattcagcaatgcacttaaaaggccaagcaaatctgtcattggtattttaagtggttaagatttattgattgattgattgagacagggcctcactctgtcacccaggctggagtgcagtggctccatcatggcccaccacatcctcaacctctcagctctagcaatcctcccacctcagcctcccgagtagctgggaccacaggtgcatgccacaatgcccagctaattctttgatttttttttttgtagagaggacatcttgctgtgttttccaggctggacctgaatgaacttctgggctcaatcaatcct

SEQ ID NO: 808 - DNA, 7224 bp, Homo sapiens
aaaattagccaggcgtggtggcgggcgcctgtattcccagctacttgggagtctgaggcaggagaatagcgtgaacctgggaggcagagcttgcagtgagcctagatcgcgtcactgcactccagcctgggcgacagagtgagactctgtctcaaaaaaaaaaaaaaagtcaaaacaagagaacatactaaatgattccatttttttatttatgacttcatgactaccattaagaaaatataacctgttgggaaactgtttctgccttgatgatgttgtacagacaagagataaacagtgaggaatatgcttagatgtattgggaaagacacgggtctgtggcattgtcacaagggtacacgaatactgagagtgaatgctgaaggaatgatccccattggtggtgaccctcaggtgagactagggtgcctgtgtttcagcaaagcctgggcaattggaatgcagggctcctaagattccatgacacccccaccttctaattctgttattgcaactgcagacggttacctggcacgctggccacaatctacctcactcttatcagagtctgagctactggcagtgctttcagctctgagttgaggcacctcaaaccttgtttttgtggtgaaggatcctaaagtgctgtgggagtgatcacatttttcacaacagtaaggtaagaatttcagttactgacatccctcagtcctgattaaacctatttgatttcaccagtttttaacccatcatatgtttgggtttcttctccccagtccctggccccacctcttctgccacaaacgtcagcatggtggtatcagccggcccttggtccagcgagaaggcagagatgaacattctagaaatcaacgagaaattgcgcccccagttggcagagaacaaacagcagttcggaaacctcaaagagagatgttttctaactcaactggccggcttcctggccaaccgacagaagaaatacagtaagatctataggctcaccgtcatgaaagtgatgaatgatgtcctgtcttctctctgagacactaaatgctctctccatcaaaaataatttcatccttcctgtacttctaggaaaacagaaatgggtattttaacattttgttaaagttggaagacagaggtaccaaagtatttagcaactttccatgtttgcaatcagatgggggtgggactagagttaaactcacagttattgatttctaacacaggcacagaacgacctgttttctccaagaggctcaatcatgttttcaagaatcctctctgtaccttataagatcctgcagacaaataacatctagtctgttgttctaaatgtctaggactagtgaacttttattcagttcaaatttccgttgaggcccaagaggcaaagctctgttctagtgactctgaggggaacttggtgatagtagccagtacctgctctgaggggcttcaagaggagtctgctcctaatagaacctgtgctacctataagtgacagcatcaagagcagggagtaggggccgtgcaacgtggctcactcctgtaatctcagcactttgggaggctgaggcgggcagagcacgaggtcagcagtttgagactagcctgggcaacatggagaaaccccatctccactaaaaatacaaaaagtagatgggcgtcgtggagggcaactgtaatcaccactaatcgggaggctgaggcagaagaatcctttgaacccagcaggcagatgttgcagtgagccaagattgcactattgcactccagcatgggtgacagggcaagactcgtcaaaaaacaaacaaacaaaaagataaataaatcaaaaataaaaataaaagagagtaccttggtgagagtgaagtcctgcttcctggtgcacaggctcttgttcctaaagaggaagaaagatcacacccgagaatgtgtggaagcagcagtgcagtgtgcaaagcagggaccctcagcctgtctcctgggctccatccaagttgcttgtcttgtctgtccctcagtttcctcatctgttcagagggtactacaataatacctacctctgtaaattgctgcaatgaattacatgaggcatttcctgtcaatctccttgaacattaattggcacagtgtaaacactatctattagttcttcattctgatgtttctaaattaacacaacgaatctaaatcttaatgctgcctctcatactaataaagtatttgggcatatttccttcatggccttattgtcttatgtctcacactttatgcttcagatatgattcttaaaaccatatctgaatattgatctaaaaatgaaatatttttaaagtccttgacatatttgtccttgaaatacccagtaaaagggaaaccatcagtcccatagtcctaggggccttcccgactgtacaagaaatcactacttcatgccccagtgcagtgttttagaggagaggctgcaaggcttgggaaagtggccccgcattcagagtcagacctcaggggctgtgagttctgactccacttcgttgtggttgaatcatcttgtcaacttccttgatgcgcccttgaggttctctttcttcgtctttaaattttggaggatcagatgccagaaagtcaggagactgaagagtaaagatgtggaaatccctgtctagaccctggtactggggagagttttgtccttgggatggacctggctcctgccctgtaggcagtgaccacagcagcatgtccagccttccactgaggcaggcgtgtctgtcttttctcagagtatgaagagtgtaaagacctcataaaatttatgctgaggaatgagcgacagttcaaggaggagaagcttgcagagcagctgaagcaagctgaggagctcaggtgaggggaccccgtggggggaggcaggcgggtaggtgtgtagatctctgaagtacagcagctcggcggggagaaataagaacgaagctgggccaggggaagggcagaaattgccatggcaggctcatgacacacaaatatttatcagagaacaaggataataataagttctgtgttgcagttgtttcttagagccttgttttctctttttcaaacaagtaattgttgatgtgaaatttacataacacaaaattcaccaaaggagtgggaaccacctagcagcattcagtatactcaaaatggtgtgctattgccaccccacttacccttagtgagaatcacctcctgactgactgcggcttctcattctttcactcaatcaatgttgccttctcgaccctgtcattcttttcttctttcgtcttttcaattcgccccatctgcccctggcctcatttctgtacatggctttgtatctagtggccgcaagatgcactatgtgtattttcacatggaaatgtccatggccagagtgaggaactgaaaagatgtctttttgaaagggaattaggaagacacctacttttgtttacagaagggaaagatgaatggaacatcatcgaggatcttgcaggagccctctctgatacagaggaagcctgtaaaccattttctattctttctcttggccacagacattcctttcaacatgtgctgaccttctgtttcaaggtctccttgaggacattatctcagaagtctctgttgcaatatttgaacggatcactcaaccctttctactcttaaattttctctaccgtctcaccttaggcaatataaagtcctggttcactctcaggaacgagagctgacgcagttaaaggagaagttacgggaagggagagatgcctcccgctcattgaatgagcatctccaggccctcctcactccggatgagccggacaagtcccaggggcaggacctccaagaacagctggctgaggggtgtagactggcacagcaccttgtccaaaagctcagcccaggtaaggtggccataggccctgatgacccaaaaccccaggcttatgagaggctccagacctccatactttcacaatgacagttgtatcagtggggtttttttctgctacacatatgtggccatgacacgatcaggacttcctgggtaagaacagagatgggaaacccatgggtttggaggtcacagtattgcaagtgtccctcctcccttgatggaaggtggtctttggagcaagaggcagcatctatctagttttaaaggacaggaaggaggctgtgatgggagggcgcttgttggagtgaaaagagctctgggctaagaatgaaggttcccaggctgtctttttggcaatgttcttagtaagtgtcggtgagtgagtgatttatctttccagagtttctctctctccatctgcaaaggcagacaaattgtctcttgcaagggtctgaagcatccaaatatgggaacacttacgaatgcttttcaaaatgagatgaagcccctctccatgtggtgttggagaaggcacttgatgtgggggcatttggtggtaggaagtgcttcagactggagcactccccatggatagaatgtccctgaataacacagcagaagccacatggagggcctgtgcagtctcatgacgcatagaggactgtgggacaagtttgtcctctcctaagagaaagaatgaggtttgaaatgcgaactgtgacaggacaccaagcctgttcctgggaatcagatctgtggcaggatgggggagacagctgccaaagtccagagagaggctgcacaagccttcagtgatatgggaagcaaaaggtcttttcagtatttggccacatcttgatggtggccctccacatcagaaatgcattgcccgatggagcaggaaaccatgccagggcattttgtgaaagataaaacatgagagttttcagtacaatgctgaaccatacatagatgttcatgtctctgtgcacgttgggctgactgtgcttgcagaatgtgaagtgggaaatatctgaatgaacattttgtatttatagaaaatgacgaagatgaggatgaagatgttcaagttgaggaggatgagaaagtactggaatcatctgcccccaggtaacactgaatactcaggagcaagtaatgggtggtaacatatgaagatgtctaggaggcacaccctctctggcatctatggtgggccaaaagcccgcatccccttggccacagtatgtgaaattgaacccagcttagacacagggtgcggcagctgtcgtgtttctctatgtgtgccaagtgtcatgtctgtaccatacagggatagctgagtcttcatcctcctcagctcctatctgtccagtgcactgaacaccagctgctctcttcctctctggctcccatggcagccatggtctgttgcagagagaagaggattgcctgttccctctttaagggaacctccgttttgctttctggaaccactctcttaatgccgcctgtcaaaaccagctagtactccctggggtccaatccctctgtgtttaatcttctgtcatctctgtcccacctggctcatcagggaggtgcagaaggctgaagagagcaaagtcgctgaggactcactggaggaatgtgccatcacttgttcaaatagccacggcccttgtgactccaaccagcctcacaagaacatcaaaatcacatttgaggaagacgaagtcaactcaactctggttgtagacagagaatcctctcatgatgaatgtcaggatgctctaaacattctcccaggtagcctctattttccttgtgtctcatacctctgtctaggctatggaagatcaattctgaggacaggctgtatatacacatattgttattgttttagtcagaaactaggatggagctaggtgctgtgactcacacatataatcacagcactttggaaggcccaagtgggacgatgacttgagttcaggagttgaagaccagcctacacaatatggtgaaacccatctttacaaagaacacaaaaaattaggcaggcatggtgctgcatgcctatagtcccaactgctcaggagacttaggtgggaggatgggctgagatgatcctcccaccctcattcacttctgtcaggctagactctctctccttttcattggcttgtcttagctattaataagtctcggctgggcgcagtgggtcacacctgtaatccgagcactttgggaggccgaggtgggtggatcaggaggtcaggagattgagaccatcctggctaacacggtgaaaccccgtctttactaaaaatgcaaaaaaaaaaaaatagctgggcgtggtggtgggcgcctgtagtcccagctactcaggaggctgaggcaggagaatggcatgaacccaggaaccggagcttgcagtgagccgagattgtgccactgcactccagcctgggagacagagcgagactccatctcaaaaaaaaaaaaaaataaagtctctgaccaggggcgctggctcacatcttaatcccaacactttgggaggccgaggtgggcggaacacctgagctcaggagttcgaaaccagcctgtccaagatggcgaaaccccatctctactaaaaatacaaaaattagctggcatgttacttggcccttgtaatcccagatgcttggccggctgagggatgagaatcacttgaacccgggcggcagaggtggcagtgagctgagattgtgcctctgcacttcagcctgcgtgacagagtgagactctgtctcaaacaaaaaaaccaaaaaagaaaaaaattaaaaaagcaaaatgaaatcttttgtgctacacagaaacattggccactcatggggtaaaaatctcagggccaagccttgctttatagaaacgtataagcaagaaaagtgtagaagtgtttatgtcttggtttcaaggtgactgcatagctaagacaagttgacttaaaggagatcaagactggagatgacaagagtgaaaccagggaaacaacatcttcaaataagtaaacaaggctgccagtgacatccctcagtcctgattaagcctatttgatttcaccagtttttaacccatcatgtgtttgcctttcttctccccagtccctggccccacctcttctgccacaaacgtcagcatggtggtatcagccggccctttgtccagcgagaaggcagagatgaacattctagaaatcaatgagaaattgcgcccccagctggcagagaagaaacagcagt

SEQ ID NO: 809 - DNA, 1407 bp, Homo sapiens
attgtcacaagggtacacgaatactgagagtgaatgctgaaggaatgatccccattggtggtgaccctcaggtgagactagggtgcctgtgtttagcaaagcctgggcaattggaatgcagggctcctaagattccatgacacccctaccttctaattctgttattgcaactgcagacggttacctggcacgctggccacaatctacctcactcttatcagagtctgagcagtgctttcagctctgagttgaggcacctcgaaccttgtttttgtggtgaaggatcctaaagtgctgtggggagtgatcacatttttcacaacagtaagttaagaatttcagttactgacatccctcagtcctgattaaacctatttgatttcaccagtttttaacccatcatatgtttgggtttcttctccccagtccctgactccacctcttctgccacaaacgtcagcatggtggtatcagccggcccttggtccagcgagaaggcagagatgaacattctagaaatcaacgagaaattgcgcccccagttggcagagaacaaacagcagttcagaaacctcaaagagagatgttttctaactcaactggccggcttcctggccaaccgacagaagaaatacagtaagatctataggctcaccatcatgaaagtgatgaatgatgtcctgtcttctctctgagacactaaatgctctctccatcaaaaataatttcatccttcctgtacttctaggaaaacagaaatgggtattttaacattttgttaaagttggaagacagaggtaccaaagtatttagcaactttccatgtttgcagtcagatgggagtgggactagagttaaactcacagttactgatttctgacacaggcacagaatgacctgttttctccaagaggctcaatcgtgttttcaagaatcctctctgtaccatataagatcctgcagacaaataacatctagtctgttgttctaaatgtctaggactagtgaacttttattcagttcaagtttctgttgaggcccaacaggcaaagctctgttctagtgactctgaggggaacttggtgatagtacccagtacctgctctgaggggcttcaagaggagtctgctcctaatagaacctgtgctatctataagtgacagcatcaagagcagggagtaggggccgtgcagcatggctcactcctgtaatctcagcactttgggaggctgaggcgggcagagcacgaggtcagcagtttgagactagcctgggcaacatggagaaaccccatctccactaaaaatacaaaaagtagatgggcgtcgtggcgggcaactgtaatcaccactaatcgggtggctgaggcagaagaagcctttgaacccagcaggcaggtgttgcagt

SEQ ID NO: 810 - DNA, 9098 bp, Homo sapiens
attgtcacaagggtacacgaatactgagagtgaatgctgaaggaatgatccccattggtggtgaccctcaggtgagactagggtgcctgtgtttcagcaaagcctgggcaattggaatgcagggctcctaagattccatgacacccctaccttctaattctgttattgcaactgcagacggttacctggcacgctggccacaatctacctcactcttatcagagtctgagcagtgctttcagctgtgagttgaggcacctcgaaccttgtttttgtggtgaaggatcctaaagtgctgtggggagtgatcacatttttcacaacagtaagttaagaattttagttactgacatccctcagtcctgattaaacctatttgatttcaccagtttttaacccatcatatgtttgggttttttctccccagtccctgactccacctcttctgccacaaacgtcagcatggtggtatcagccggcccttggtccatcgagaaggcagagatgaacattctagaaatcaacgagaaattgcgcccccagttggcagagaacaaacagcagttcagaaacctcaaaggagatgttttctaactcaactggccggcttcctggccaaccgacagaagaaatacagtaagatctataggctcaccatcatgaaagtgatgaatgtgagacactaaatgctctctccatcaaaaataatttcatccttcctgtacttctaggaaaacagaaatgggtattttaacattttgttaaagttggaagacagaggtaccaaagtatttagcaactttccatgtttgcaatcagatgggggtgggactagagttaaactcacagttattgatttctaacacaggcacagaacgacctgttttctccaagaggctcaatcatgttttcaagaatcctctctgtaccatataagatcctgcagacaaataacatctagtctgttgttctaaatgtctaggactagtgaacttttattcagttcaagtttctgttgaggcccaacaggcaaagctctgttctagtgactctgaggggaacttggtgatagtacccagtacctgctctgaggggcttcaagaggagtctgctcctaatagaacctgtgctatctataagtgacagcatcaagagcagggagtaggggccgtgcaacgtggctcactcctgtaatctcagcactttgggaggctgaggcgggcagaggacgaggtcagcagtttgagactagcctgggcaacatggagaaaccccgtctccactaaaaatacaaaaagtagatgggcgtcgtggcgggcaactgtaatcaccactaatcgggaggctgaggcaggagaatcctttgaacccagcaggcagatgttgcagtgagtcaagattgcactattgcactccagcatgggtgacagggcaagactcgtcaaaaaacaaacaaacaaaaagataaataaatcaaaaataaaaataaaaagcagagagtaccttggtgagagtgaagtctgcttcctggtgcacaggctcttgttcctaaagaggaagaaagatcacacccgagaacgtgtggaagcagcagtgcagtgtgcaaagcagggaccctcagcctgtctcctgggctccatccatgttgcttgtcttgtctgtccctcagtttcctcatctgttcagagggtactacaataatgcctacctctgtaaattgctgcaatgaattacatgaggtatttcctgtcgatctccttgaacattaattggcacagtgtaaacactatctattagttcttcattctgatgtttctaaattaacacaaactaatcttatgctgtttctaaattaacacaactaatctaaatcttaatgctgcctctcatactaataaagtatttgggcatattttcttcatggccttattgtcttatgtctcacactttaggcttcagatatgattcttaaaaccatatctgaatattgatttaaaaatgaaatatttttaaagttcttgacatatttgtccttgaaatacccagtaaaagggaaaccatcagtcccatagtcctaggggccttcctgactgtacaagaaatcactacttcatgccccagtgcagtgttttagaggagaggctgcaaggcttgggaaagtggccccgcattcagagtcagacctcaggggctgtgagttctgactccacttcgttgtggttgaatcatcttgtcaacttccttgatgcgcccttgagtttctctttcttcgtctttaaattttggaggatcagatgccagaaagtcagaagactgaagagtaaagatgtggaaatccctgtctagaccctggtactggggagagttttgtccttgggatggacctggctcctgccctgtaggcagtgaccacagcagcatgtccagccttccactgaggcaggcgtgtctgtcttttctcagagtatgaagagtgtaaagacctcataaaatttatgctgaggaatgagcgacagttcaaggaggagaagcttgcagagcagctcaagcaagctgaggagctcaggtgaggggaccccgtagggggagacaggcaggtaggtgtgtagatctctgaagtacagcagctcggcggggagaagtaagaacgaagctgggccaggggaagggcagaaattgccatggcaggctcatgacacacaaatatttatcagagaacaaggataataataagttctgtgttgcagttgtttcttagagccttgttttctctttttcaaacaagtaattgttgaggtgaaacttacataacacaaaattcaccaaaggagtgggaaccacccagcagcattcagtataatcaaaatggtgtgctattgccaccccacttacccttagtgagaatcacctcctgactgactgcgtcttctcattctttcactcaatcaatgttgccttctcgaccctgtcattcttttcttctttcgtcttttcaattcgccccatctgcacctggcctcatttctgtacatggctttgtatctagtggccgcaagatgcactatgtgtattttcacatggaaatgtccatggccagagtgaggaactgaaaggatgtctttttgaaacggaattaggaagacacctacttttatttacagaagggaaagatgaatggaacatcatcgaggatcttgcaggagccctctctgatagagggaaagcctgtagaccattttctgttctttctcttggccacagacattcctttcaacatgtgctgaccttctgcttgaaggtctccttgagaacattgtctcagaaatctctgttgcaatatttgaacggatcactcaatgcttttcactgttaaattttctctaccgtctcaccttaggcaatataaagtcctggttcactctcaggaacgagagctgacccagttaagggagaagttacgggaagggagagatgcctcccgctcattgaatgagcatctccaggccctcctcactccggatgagccggacaagtcccaggggcaggacctccaagaacagctggctgaggggtgtagactggcacagcaccttgtccaaaagctcagcccaggtaaggtggccataggccctgatgacccaaaaccccaggcttatgagaggctccagacctccatactttcacaatgacagttgtatcagtggggtttttttctactacacatatgtggccatgacatgatcaggacttcctgagtaagaacagaaatgggaaacccatcggtttggaggtcacagtattgcaagtgtccctccttccttgatggaaggtggtctttggagcaagaggcagcatctatctagttttaaaggacaggaaggaggctgtgatgggagggcgcttgttggagtgaaaagagctctgggctaagaatgaaggttcccaggctgtctttttggcaatgttcttagtaagtgtcggtgagtgagtgatttatctttccagagtttctctctctccatctgcaaaggcagacaaattgtctcttgcaagggtctgaagcatccaaatatgggaacacttacgaatgcttttcaaaatgagatgaagcccctctccgtgtggtgttggagaaggcacttgatgtgggggcatttggtggtaggaagtgcttcagactggagcactccccatggatagaatgtccctgaataacacagcagaagccacatggagggcctgtgcagtctcatgacgcatagaggactgtgggacaagtttgtcctctcctaagagaatgaatgaggtttgaaatgcgaactgtgacaggacaccaagcctgttcctgggaatcagatctgtggcaggatgggggagacagctgccaaagtccagagagaggctgcacaagcctccagtgatatgggaagcaaaaggtcttttcagtatttggccacatcttgatggtggccctccacatcagaaatgcattgcctgatggaccaggaaaccatgccagggcattttgtgaaggataaaacatgagagttttcagtacaatgctgaaccatacatagatattcatgtctctgtgcacgttgggctgactgtgcttgcagaatgtgaagtgggaaatatctgaacgaacattttgtatttatagaaaatgacgaagatgaggatgaagatgttcaagttgaggaggatgagaaagtactggaatcatctgcccccaggtaacattgaatactcaggagcaagtaatgggtggtaacatatgaaaatgtctaggaggcacgccctctctggcatctatgatgggccaaaagcccgcattcccttggccacagtatgtgaaattcaacccagcttagacacagggtgcggcagctgttgtgtttctctatgtgtgccaagtgtcatgtctgtaccatacagggatagctgagtcttcatcctcttcagctcctatctgtccagtgcactgaacaccagctgctctcttcctctctggctcccatggcagcgaagctctgttgcagagagaagaggattgcctgttccctcttaaagggaacctccatttgttttctgggaccactctcttaatgccgcttgtcaaaaccagctaggactccttggggtccaatccctctgtgtttaatcttctgtcatctctgtcccacctggctcatcagggaggtgcagaaggctgaagagagcaaagtccctgaggactcactggaggaatgtgccatcacttgttcaaatagccacggcccttgtgactccatccagcctcacaagaacatcaaaatcacatttgaggaagacaaagtcaactcatctctggttgtagacagagaatcctctcatgatggatgtcaggatgctctaaacattctcccaggtagcctctattttccttgtgtctcatacctctgtctaggctatggaagatcaattctgaggacaggctgtatatacacatattgttattgttttagtcagaaactaggatggagctaggtgctgtgactcacacatataatcacagcactttggaaggcccaagtgggaggatgacttgagttcaggagttgaagaccagcctggagtatatggtgaaacccatctttacgaagaatacaaaaaattaggcaggcatggtgctgcccgcctatagtcccaactgctcaggagacttaggtgggaggatgggctgagatgatcctcccaccctcattcacttctgtcaggctagactctctctccttttcattggcttgtcttagctattaataagtcttggctgggcgcagtgggtcacacctgtaatccgagcactttgggaggccgaggcgggtggatcacgaggtcaggagattgagaccatcctggctaacacggtgaaaccccgtctttactaaaaatacaaaaaaaaaagaaattagctgggcgcggtggtgggcgcctgtagtcccagctactcaggaggctgaggcaggagaatggcatgaacccaggaaccggatcttgcagtgagccgagactgtggcactgcactccagcctgggagacagagcgagactgcatctcaaaaaaaaaaaaaaaaagtctctgaccagggacgctggctcacatcttaatcccagcactttgagaggccaaggtgggcggaacacctgagctcaggagttcgaaaccagcctgtccaagatggcgaaaccccatctctactaaaaatacaaaaattagctgtcatgttacttggcgcttgtaatcccagatgcttggcaggctgagtgatgagaatcgcttgaacccgggaggcagaggtggcagtgagctgagattgtgcctctgcactgcagcctgcgcgacagagtgagactccgtctcaaacagaaaacaaaaaaccaaaaaaggaaaaaatttaaaaagcaaaatgaaatcttttgtgctacacagaaacattggccactcatgggataaaaatctcagggccaagccttgctttatagaaacgtataagcaagtgtagaagtgtttatgtcttggtttcaaggtgactgcatagctaagacaagttgacttaaaggagatcaagactggagatgacaagagtgaaaccagggaaacaacatcttcaaataagtaaacaaggctaccagtgacatccctcagtcctgattaagcctatttgatttcaccagtttttaacccatcatatgtttgcctttcttctccccagtccctggccccacctcttctgccacaaacgtcagcatggtggtatcagccggccctttgtccagcgagaaggcagagatgaacattctagaaatcaatgagaaattgtgcccccagctggcagagaagaaacagcagttcagaagcctcaaagagaaatgttttgtaactcaagtggcctgcttcctggccaagcagcagaacaaatacagtaagatctatatgctcaccatcacgaaagtgatgaacgaagtcctgtcttctctctgagaaactaagtgctctctccatcaaaaataatgtcatcctccccatacttctaggaaaacagaaatgggtattttaacattttgttaaagttggaagacagaggtaccaaagtatttagcaactttccatgtttgcaatcaggtgggggtgggactagagttaaactgccatttattgatttctgacacaggcacagaatgacctgttttctccaagaggctcaatcgtgttttcaagaatcctctctgtaccacataagatcctgcagacaaataacatctagtctgttgttctaaatatctgagactagtgaacttttattcagttcaagtttctgttgaggcccaatacacaaagctctgttctagtgactctgagggaaacttggtgatagtagccagtacccgctctgaggggcttcaagaggagtctgctcctaatagaacctgtgctatctataagtgacagcatcaagagcagggagtaggggccgtgcatggtggctcactcctgtaatcccagccctttgggaggctgaggcgggtagagcacgaggtcaggagtttgagaccagcctgggcaacatggagaaaccccatctccactaaaaatacaaaaagtagatgggcgtggtggcaggtgactgtaatcacccctgctcaggaggctgaggcagtagaatcctttgaacccaggaggctgaggttgcagtgagccaagattttgccgttgcactccagcctgggtgacagggcaagactgttaaaaaaaaataataatgataaataaaaataagaataaaaagcagagagtagcttggtgagagtgaagtcctgcttcctggggcacagagtcttgttcctaaagaggaagaaagatcgcacccgagaatgtgtggaggtagcagtgcagtgtacagagcagggaccgtgggcctgtctcctgggctccatccaaggtgcttgtcttctctgtccctcagtttcctcacctgttcagagggtactacaataatacctacctctgtaaattgctgcagtgaattacatgagctatttcttgtcaatctcctagaacgtttattggcacagagtaaacactatctattagttcttcattctgctgtttctaaattaacagaaacttcattagcatttgggcataggatttccttcatggccttatggtgttatgtgtcacactttatgcttcagatatgattcttaaaatcataactgaagatatgattaaaaaatcaaagatttttaaaatctttcacatacttgtccttgaaattcccagtaaaagggaaaccatcagtcccatagtcctaggggccttcccgactgtacaagaaatcactacttcatgccccagtgcagtgttttagaggagaggctgcaagtcttgggaaagtggccccgaattcagagtcagacctcagggactgtgaattctgactccacttcgttgtggttgaatcatcttgtcaacttccttgatgtgcccttgagtttctctttcttcatctctaaattttggaggatcagatgccagaaagtcaggagactgaagagtaaagacgtggaaatccctgtctagaccctggtactgtggagagttttgtccttgggatggacctggctcctgccctgtaggcaatgaccacagcagcatgtccagccttccactgatgcaggcgtgtctgtcttttctcagaatatgaagagtgcaaagacctcataaaatctatgctgaggaatgagcgacagttcaaggaggagaagcttgcagagcagctgaagcaagctgaggagctcaggtgaggggaccccatgggggcaggcaggggggcaggtgtgtaaatctctgaagtacagtagctcagtggggagacgtaagagctaagctgggccaggggaagggcaggaattgccatggcaggtttgctacacacaaatatttatcaaacagagaagaaggataataaaaatttatgggttgcagttgtttctcagagccttgttttctctttttcaaacaagtaattgttgatgtgaaatttacataacaca

SEQ ID NO: 811 - DNA, 17773 bp, Homo sapiens
aaaattagccaggcgtggtggcgggcgcctgtattcccagctacttgggagtctgaggcaggagaatagcgtgaacctgggaggcagagcttgcagtgagcctagatcgcgtcactgcactccagcctgggagacagagtgagactctgtctcaaaaaaaaaaaaaagtcaaaacaagagaacatactaaatgattccatttttttatttatgacttcatgactaccattaagaaaatataacctgttgggaaactgtttctgccttgatgatgttgtacagacaagagataaacagtgaggaatgtgcttagatgtattgggaaagacacgggtctgtggcattgtcacaagggtacacgaatactgagagtgaatgctgaaggaatgatccccattggtggtgaccctcaggtgagactagggtgcctgtgtttcagcaaagcctgggcaattggaatgcagggctcctaagattccatgacacccccaccttctaattctgttattgcaactgcagaccgttacctggcacgctggccacaatctacctcactcttatcagagtctgagctactggcagtgctttcagctctgagttgaggcacctcgaaccttgtttttgtggtgaaggatcctaaagtgctgtgggagtgatcacatttttcacaacagtaaggtaagaatttcagttactgacatccctcagtcctgattaaacctatttgatttcaccagtttttaacccatcatatgtttgagtttcttctccccagtccctgactccacctcttctgccacaaacgtcagcatggtggtatcagccggcccttggtccagcgagaaggcagagatgaacattctagaaatcaacgagaaattgcgcccccagttggcagagaacaaacagcagttcgtaaacctcaaagagatgttttctaactcaactggccggcttcctggccaaccgacagaagaaatacagtaagatctataggctcaccgtcatgaaagtgatgaatgatgtcctgtcttctctctgagacactaaatgctctctccatcaaaaataatttcatccttcctgtacttctaggaaaacagaaatgggtattttaacattttgttaaagttggaagacagaggtaccaaagtatttagcaactttccatgtttgcaatcagatgggggtgggactagagttaaactcacagttattgatttctaacacaggcacagaacgacctgttttctccaagaggctcaatcatgttttcaagaatcctctctgtaccatataagatcctgcagacaaataacatgtagtctgttgttctaaatgtctaggactagtgaacttttattcagttcaagtttctgttgaggcccaacaggcaaagctctgttctagtgactctgaggggaacttggtgatagtacccagtacctgctctgaggggcttcaagaggagtctgctcctaatagaacctgtgctatctataagtgacagcatcaagagcagggagtaggggccgtgcaacatggctcactcctgtaatctcagcactttgggaggctgaggcgggcagagcacgaggtcagcagtttgagactagcctgggcaacatggagaaaccccatctccactaaaaatacaaaaagtagatgggcgtcgtggcgggcaactgtaatcaccactaatcgggaggctgaggcagaagaatcctttgaacccagcaggcagatgttgcagtgagccaagattgcactattgcactccagcatgggtgacagggcaagactcgtcaaaaaacaaacaaaacaaaaagataaataaatcaaaaataaaaataaaaagcagagagtagcttggtgagagtgaagtcctgcttcctggtgcacaggctcttgttcctaaagaggaagaaagatcacacccgagaatgtgtggaagcagcagtgcagtgtgcaaagcagggaccctcagcctgtctcctgggctccatccaagttccttgtcttgtctgtccctcagtttcctcatctgttcagagggtactacaataatacctacctctgtaaattgctgcaatgaattacatgaggcatttcctgtcaatctccttgaacattaattggcacagtgtaaacactatctattagttcttcattctgatgtttctaaattaacacaaactaatcttatgctgtttctaaattaacacaacgaatctaaatcttaatgctgcctctcatactaataaagtatttgggcatatttccttcatggccttattgtcttatgtctcacactttatgcttcagatatgattcttaaaaccatatctgaatattgatttaaaaatgaaatatttttaaagtccttgacatatttgtccttgaaatacccagtaaaagggaaaccatcagtcccatagtcctagggaccttcccgactgtacaagaaatcactacttcatgccccagtgcagtgttttagaggagaggctgcaaggcttgggaaagtggccccgcattcggagtcagacctcaggggctgtgagttctgactccgcttcgttgtggttgaatcatcttgtcaacttccttgacacgcccttgagtttctctttcttcgtctttaaattttggaggatcagatgccagaaagtcaggagactgaagagtaaagatgtggaaatccctgtctagaccctggtactggggagagttttgtccttgggatggacctggctcctgccctgtaggcagtgaccacagcagcatgtccagccttcaactgaggcaggcgtgtctgtcttttctcagagtatgaagagtgtaaagacctcataagatttatgctgaggaatgagcgacagttcaaggaggagaagcttgcagagcagctcaagcaagctgaggagctcaggtgaggggaacccgtagggggaggcaggcgggtaggtgtgtagatctctgaagtacagcagctcggcggggagaagtaagaatgaagctgggccaggggaagggcagaaattgccatggcaggctcatgacacacaaatatttatcagagaacaaggataataataagttctgtgttgcagttgtttcttagagccttgttttctctttttcaaacaagtaattgttgaggtgaaatttacataacacaaaattcaccaaaggagtgggaaccacccagcagcattcagtataatcaaaatggtgtgctatcgccaccccacttacccttagtgagaatcaccttctgactgactgcgtcttctcattctttcactcaatcaatgttgccttcttgaccctgtcattcttttcttctttcatcttttcaattcgccccatctgcacctggcctcatttctgtacatgactttgtatctagtggccgcaagatgcactatgtgtattttcacatggaaatgcccatggccagagtgaggaactgaaaggatgtctttgaaacggaattaggaagacacctacttttgtttacagaagagaaagatgaatggaacatcatcgaggatcttgcaggagccctctctgatacagggaaagcctgtagaccattttctgttctttctcttggccacagacattcctttcaacatgtgctgaccttctgcttgaaggtctccttgtgaacattgtctcagaaatctctgttgcaatatttgaacggatcactcaaccctttctactcttaaattttctctaccgtctcaccttaggcaatataaagtcctggttcactctcaggaacgagagctgacgcagttaaaggagaagttacaggaagggagagatgcctcccgctcattgaatgagcatctccaggccctcctcactctggatgagccggacaagtcccaggggcaggacctccaagaacagctggctgaggggtgtagactggcacagcaccttgtccaaaagctcagcccaggtaaggtggccataggccctgatgacccaaaaccccaggcttatgagaggctccagatctccatactttcacaatgacagttgtatcagtggggtttttttctgctacacctatgtggccatgacatgaccaggacttcctgggtaagaacagagatgggaaacccatggtttggaggtcacagtattgcaagtgtccctccttccttgatggaaggtggtctttggagcaagaggcagcatctatctagttttaaaggacaagaaggaggctgtgatgggagggcgcttgttggagtgaaaagagctctgggctaagaatgaaggttcccaggctgtctttttggcaatgttcttagtaagtgtcggtgagtgagtgatttatctttccagagtttctctctctccatctgcaaaggcagacaaattgtctcttgcaagggtctgaagcatccaaatatgggaacacttacgaatgcttttcaaaatgagatgaagcccctctccatgtggtgttggagaaggcacttgatgtgggggcatttggtggtaggaagtgcttcagactggagcactccccatggatagaatgtccctgaataacacagcagaagccacatggagggcctgtgcagtctcatgacgcatagaggactgtgggacaagtttgtcctctcctaagagaaagaatgaggtttgaaatgcgaactgtgacaggacaccaagcctgttcctgggaatcagatctgtggcaggatgggggagacagctgccaaagtccagagagaggctacacaagcctccagtgatatgggaagcaaaaggtcttttcagtatttggccacatcttgatggtggccctccacatcagaaatgcattgcccgatggaccaggaaaccatgccagggcattttgtgaaagataaaacatgagagttttcagtacaatgctgaaccatacatagatgttcatgtctctgtgcacgttgggctgactgtgcttgcagaatgtgaagtgggaagtatctgaacgaacattttgtatttatagaaaatgacgaagatgaggatgaagatgttcaagttgaggaggatgagaaagtgcagaaatcatctgcccccaggtaacactgaatactcaggagcaagtaatgggtggtaacatatgaaaatgtctaggaggcacaacctctctggcatctatggtggaccaaaagcccgcatccccttggccacagtatgtgaaattgaacccagcttagacacagggtgcggcagctgtcgtgtttctctatgtgtgccaagtgtcatgtctgtaccatacagggatagctgagtcttcatcctcctcagctcctatctgtccagtgcactgaataccagctgctctcttcctctctggctcccatggcagccatggtctgttgcagagagaagaggattgcctgtttcctctttaagggaacctccattttgctttctggaaccactctcttaatgccacctgtcaaaaccagctaggactccctggggtccaatccctctgtgtttaatcttctgtcatctctgtcccacctggctcatcagggaggtgcagaaggctgaagtgagcaaagtccctgaggactcactggaggaatgtgccatcacttgttcaaatagccacggcccttgtgactccaaccagcctcacaagaacatcaaaatcacatttgaggaagacgaagtcaactcaactctggttgtagacagagaatcctctcatgatgaatgtcaggatgctctaaacattctcccaggtagcctctattttccttgtgtctcatacctctgtctaggctatggaagattaattctgaggacaggctgtatatacacatattgttattgttttagtcagaaactaggatggagctaggtgctgtgactcacacatataatcacagcactttggaaggcccaagtgggacgatgacttgagttcaggagttgaagaccagcctggacaatatggtgaaacccatctttacaaagaatacaaaaaattaggcaggcatggtgctgcatgcctatagtcccaactgctcaggagacttaggtgggaggatcggctgagacgatcctcccacgctcgttcactcctctcaggctagactctctctccttttcattggcttgtcttagctattaataagaagtctcggcctggcgcggtggctcacacatgtaatccgagcactttgggaggccggggcgggtggatcacgaggtcaggagatcgagaccatcctggctaacacggtgaaacgccgtctttactaaaaatacaaaaaaaaaaaaaaaaattagctgggcgcggtggtgggcgcctgtagtcccagctactcaggaggctgagacaggagaatggcatgaacccaggaaccggagcttgcagtgagccgagattgtgccactgcactccagcctgggagacagagcgagactccatctcaaaaaaaaaagtaagtctctgaccaggggcgctggctcacatcttaatcccagcactttgggaggctgaggtgggcagaacacctgagatcaggagttcgaaaccagcctgtccaagatggcgaaaccccatctctactaaaaatacaaaaattagctggcatgttacttggcgcttgtaatcccagatgcttggcaggctgagggatgagaatcgcttgaacccgggcggcagaggtggcagtgagctgagattgtgcctctgcactgcagcctgcacgacagagtgagactccgtctcaaacaaaaaacaaaaaaccaaaaaagaaaaaaattaaaaaagcaaaatgaaatcttttgtgctacacagaaacattggccactcatggggtaaaaatctcagggccaagccttgctttatagaaacttataagcaagaaaagtgtagaagtgtttatgtcctggtttcaaggtgactgcatagctgagacaagttgacttaaaggagatcaagactggagatgacaagagtgaaaccagggaaacatcatcttcaaataagtaaacaaggctgccagtgacatccctcagtcctgattaagcctatttgatttcaccagtttttaacccatcatgtgtttgcctttcttctccccagtccctggccccacctcttctgccacaaacgtcagcatggtggtatcagccggccctttgtccagcgagaaggcagagatgaacattctagaaatcaatgagaaattgcacccccagctggcagagaagaaacagcagttcagaaacctcaaagagaaatgttttctaactcaactggccggcttcctggccaaccagcagaacaaatacagtaagatctacaggctcaccatcatgaaagtgatgaatgatatcctgtcttctctctgagacactaaatgctctctccatcaaaaataatttcatccttcctgtacttctaggaaaacagaaatgggtattttaacattttgtcaaagttggaagacagaggtaccaaagtatttagcaactttccatgttttcaatcaggtgggggtgggactagagttaaactgccatttattgatttctgacacaggcacagaatgacctgttttctccaagaggctcaatcgtgttttcaagaatcctctctaccatataagatcctgcagacaaataacatctagtctgttgttctaaatgtctgagactagtgaacttttattcagttcaagtttctgttgaggcccaacagacaaagctctgttctagtgactctgagggaaacttggtgatagtagccagtacctgctctgagggcttaaagaggagtctattcctaatagaacctgtgctgtctataagtgacagcatcaagagcagggagtaggggccgtgcatggtggctcactcctgtaatcccagcactttgggaggctgaggcgggcagatcatgaggtcaggagtttgggaccagcctgggcaacatggagaaaccccatcttcactaaaaatacaaaaagtagatgggcgtggtggcaggtgactgtaatcacccctgctcaggaggctgaggcaagagaatcctttgaacccaggaggctgaggttgcagtgagccaaggttttgccattgcactccagcctgggcgacagggcaagactgttaaaaataataataataataatgataaataaaaataagaataaaaagcagagagtagcttggtgagagtgaagtcctgcttcctggggcacagattcttgttgctaaagaggaagaaagatcccacccgagaatgtgtggagatagcagtgcagtgtacagagcagggaccgtgggtctgtctcctgggatccatccaagttgcttgtcttgtctgtccctcagtttcctcacctgttcagagggtactacaataatacctacctctgtaaattgctgcagtgaattacatgagctatttcttgtcagtctcctagaacatttattggcacacagtaaacactatctattagttcttcattctgctgtttctaaattaacacaaactttattagcatttgggcatatttccttcatggccttatggtgttatgtgtcacactttatgcttcagatatgattcttaaaatcataactgaagatatgatttaaaaatcaaagattttaaaaatctttcgcatacttgtccttgaaattcccagtgaaagggaaaccatcagtcccatagtcctaggggccttcccgactgtacaagaaatcactacttcatgccccagtgcagtgttttagaggagaggctgcaaggcttgggaaagtggccccgcattcagagtcagacctcagggactgtgaattctgactccacttcgttgtggttgaatcatcttgtcaacttccttgatgtgcccttgaggttctctttcttcatctccaaattttggaggattagatgccagaaagtcaggagactgaagagtaaagatgtggaaatccctgtctagaccctggtactggggagagttttgtccttgggatggacctggctcctgtcctgtaggcaatgaccacagcagcatgtccagccttccactgaggcaggcgtgtctgtcttttctcagaatatgaagagtgcaaagatctcataaaatctatgctgaggaatgagcgacagttcaaggaggagaagcttgcagagcagctcaagcaagctgaggagctcaggtgaggggaccccatgggggcaggcaggggggcaggtgtgtaaatctctgaagtacagcagctcggtggggagatgtaagagctaagctgggccaggggaagggcaggaattgccatggcaggctcgctacacacaaatatttatcaaacagagaaggaggatagtaaaaatgtatgggttgcagttgtttctcagagccttgttttctctttttcaaacaagtaattgttgatgtgaaatttacataacacaaaattaaccaaaggagtgtgaaccacacagcagcattcagtatactcaaaatggtgtgccatcaccaccccacttacccttagtgagaatcacctcctgactgactgcggcttctcattctttcactcaatcaatgttgccttctcgaccctgtcattcttttcttctttcgtcttttcaattcgccccatctgcacctggcctcatttctgtacatggctttgtatctagtggccgcaagatgcactatgtgtattttcacatggaattgtccatggccagagtgaggaactgaaaggatgtctttttgaaatggaattaggaagacacctacttttgtttacagaagagaaagatgaatggaacatcatcgaggatcttgcaagagctctctgtgatacagaggaagcctgtaaaccattttctattctttctcttggccacagacattcctttcaacatgtgctgaccttctgtttcaaggtctccttgaggacattgtctcagaagtctctgttgcaatatttgagcggatcactcaaccctttccactcttaaattttctctaccgtctcaccttaggcaatataaagtcctggttcacactcaggaacgagagctgacccagttaagggagaagttgcgggaagggagagatgcctcccgctcattgaatgagcatctccaggccctcctcactccggatgagccggacaagtcccaggggcaggacctccaagaacagctggctgaggggtgtagactggcacagcaccttgtccaaaagctcagcccaggtaaggtggccataggccctgatgacccaaaatcccaggcttatgagagactccagacctccatactttcacaatgacagttgtatcaatggtgtttttttccactaagcttatgtggccatgatatgaccaggacttcttgggtaagaacggagatgggaaacccatggggttggaggtcacagtattgcaagtgtccctcctcccttgatggaaggtggtctctggagcaagaggcagcatctgtctagttttaaaggacaggaaggaggctgcgatgggagcaggcttgttagagtgaaaagagctctggactaagaatgaaggttcccaggctgtcttttcggcaatgttcttagtaactgtcagagagtgaatgacttgtccttcctgagtttctctctctctgtggcagacaaattgtctcttgcaagggtcgaagcattcaaatgtgggaacacttacaactgctttccaaaatgagatgaaggccctcgccgtgtgatgttggagaaggcactttatgtgggggcgttttgtggtaggaagtgcttcagactggagcgctccccatggatagaatgtccctgaagaacacagcagaagccacttggaggcttgaaatcttctgatgcatagaggactgtgggacatgtttgtctgcttctaagagaaagaattaggtttgaaatgcaaaccgtgacaggacaccaagcctgtgcctgggaatcagatctggcaggatgggggagacagctgccaacgtccagagagaggctgcacaagcctccagtgatatgggaagcaaaaggtcttttcaatatttggccacatcttgatggtggccctccagatcagaaatgcattgcctgatggatcaggaaaccatgccagggcattctgttaaagataaaacatgagagttttcagttgaacggtgacccatgcctagatgttcatgtctctgttgcacattgggctgactgtgcttgcagactgtgaagtgggaaatatctgaacgaacacttctgtatttacagaaaatgacaacgatgacgatgaagatgttcaagttgaggtggctgagaaagtgcagaaatcgtctgcccccaggtaacactgaatactcaggaacaattaatggatggtaacatatgaggaatatctaggaggcacaccctctctggcatctatgatgggtcaaaaacccgcattcgcttggccacagtatgtgaaatataacccagcttagacacagggtgcggtagctgtcatgtttctctatgtgtgccgagtgtcatgtctgtaccgtacagggatagctgagtcttcatcctcctcagctcctatctgtccagtgcaatgaacagcagctgctctcttcctctctggttcccatggcagccatgctctgttgcagagagaacaggattgcatgttccctcttaatgggaacctccattttgctttctgggaccactctcttaatgccacctgtcaaaaccagctaggactccctggggtccaatccctctgtgtttaatcttctgtcatctctgtcccacctggctcatcagggagatgcagaaggctgaagaaaaggaagtccctgaggactcactggaggaatgtgccatcacttattcaaatagccatggcccttatgactccaaccagccacataggaaaaccaaaatcacatttgaggaagacaaagtcgactcagctctcattggctcatcctctcatgttgaatgggaggatgctgtacacattattccaggtagcctctgttttccttgtgtctcatacctctctctaggctgaggaagataaactctgaagacaggctctataaacacaaattcatttgaataaaaaactgtgatgggtttctaaacagatatcagggagtttttttgtccttcacagctaatgtcatgactttgtctgccagtccccagtatcaagttactcaaccccaggcaagtgtgacaatctcatagtcacctgagtgcaggaggtgcacaggcagtatctgtcaggcctcctagcttcgattcagtatctcttgtcatctgtgattaagtcatctgtccctgaacaatgtccatggagtttctatgcctgtttaaggaagctggcagccttgcctttgtatttggaattattgttccccaggcttcactgctctcagctttcatctggatctcctttaagtcagcttgcttagctgcacagtcaccctgaaatcagtacggaaacttttcttctttactttgctgatatatttccataaagcaaggctggaccctggttctccaccctgtcaatgcaatggctgatccaatgtttctttgtagcatcgtggatttttttttttttttttttttttttttttttttttgcgatggagtcttgctctgtcacccaggctggagtgcagtggcaccatcttggcttggtgcaacgtctgcctcccagattcaagtgattctcctgcctcagcctcctgagttgctgggaccacaggtgcacaacatcacatctggctaatttttgtatttttagtagagacagggtttccccatgttggccagggtagtcctgaactcatgacctcaaatgattcacctgtcttggcctcccaaatcacagattctttttaaagcaagagttgttcaaatttatctatcagtcgtgtttcatgtatagatgcctctaaacatttaatgtccatgttacctggtgatataagtccatatcgcagcaacactcttagaaaattgttttaccaatttttggagatttttttggggaaaaaattttgtttaactttgactcaagcagggaatatggcattatggtctacatgtagagggagattttggcctgtgggtctggaaagcagggtcatctaattctcaccaaagttaatctaggacaacctagaatattcctgtcagaatccttattcttgcactgagaatagttatgtccttgtgctatgattggacagtgatttgttcatatgtgaagtatgaattgcttaatgtgacctgcttctctgaatttatttacagaaaatgaaagtgatgatgaggaagaggaagaaaaagggccagtgtctcccaggtaatgttgtggaattgttggctgttaattcagtagtgacatctggagattgtagatttagggaaaatgaggaagtgatgaatagaactatttcttccattcacccagctacaaattgtgctgatttacaatgttgtatgttatttgtggcacttgtattggttttaatttcatagtcctctcaagataggaacttgccatcagatgagccaggtgaactagccaaacagggttttcttgttgatcttttcaaaaaaccagccctggattcattgattttttgaagggttttttgtgtctctatctcctttagttctgctctgatcttagttacttcttgtcttctgctagcttttgaatttgtttgctttgcttctctcgttattttaattgtgatgttagggtgtcaattttagatcttttctgctttctcttgtgggcatttagtgctataattttccctctacacattgctttaaatgtgtcccagagattctggtatgttgtgtcttttttctcattggtttcaaagaacatctttatttctgccttcattttgttattttcccagtagtcattcaggagcaggttgttcagtttccatgtagttgtgcggttttgagtgagtttcttaatcctgagttctaatttgatggcactgtggtctgacagttcgttgtgatttccattcttttacatttgctgacgagtgctttacctccaactatgtggtcaattttggaataagtgtgatgtggtgctgagaagaatgtatattctgttgatttggggtggagggttctgtagatgtcttttaggtctgcttggtggagagctgagttcaagtcctggatatccttgttaagcttctgtctcattgatctgtctaatattgacactggggtgttaaagtctcccattatgattgtgtggagtctaaatctctttgtaggtctctcaggacttgctttatgaatctgggtgctcctgtatagggtgcatatatatttaggatagttaactcttcttgttgaattgatccctttaccattatgtagtggccttctttgtctcttttgatctttgttggttgaaagtctgttttatcagagactaggattgcaacccctgcctttttttgttttccatttgcttggtagatcttcctccatccctttattttgagcctatgtgtgtctctgcatgtgagatgggtttcctgagtacagcacactgatgggtcttgactctttatccaatttgccattctgtgttttttaactggggcatttagcccatttacatttaaggttaatattgttatgtgtgaatctgatcctgtcgttatgatgttagctggttatttcgcccgttagttgatgcaatttcttcctagcgtcaatggtctttacagtttggcatgtttttgcagtggctggtaccggttgttcctttccatgtttagtgcttcctttaggagctcttgtaaggcaggcctggtggtgacaaaatctctcagcatttgcttctctgtaaaggatttatttctccttcacttatgaagctttgtttggctggatatgaaattcttggttgaaaattcttttctttaagaatgttgaagatgctggagaggatgtggagaaataggaacacttttacactgttggtgggactgtaaactagttcaacgattgtggaaggcagtgtggcaattcctcagggatctagaactagaaataccatttgacccagccatcccattactgggtgtatacccaaaggattataaatcatgctgctgtaaagacacatgcacacatatgtttattgcggcactattcacaatagcaaagacttggaaccaagccaaatatccagcaatgatagactggattaagaaaatgtggcacatatacaccatggaatactatgcagctataaaaaatgatgagttcatgtcctttgtagcggcatggatgaagctggaaaccatcattctcagcaaactattgcaaggacaaaaaaccaaataccgcatgttcttactcacaggtgggaattgaacaatgagaacacatggacacagaaaggggaacatcacacactggggcctgttgtagggtggggggagggaggaggggtagcattaggagatatacctaatgttaaatgatgagttaatgggtgaagcacaccaatgtggacatgtatacatatgtaactaacctgcacgttgtgcacatgtaccctaagacttaaagtattaaaaaaatatatatatatatatatatacatacacacaaaaaataataaaggaaaactatacatatggaaaaaaaaaagaatgttgaatattgctcccactctcttctggcttgtagggtttgtgccaagagatctgctgctagtctgatgggtttccctttgtgggtaatccgacctttctctctggctgcccttagcattttttccttcatttcaaccttggtgaatctgacaattacgtgttttggggttgctcttctcgaggagtatctttatggtgttctctgtgtttcctgaatttgaatgttggccttccttgctaggttggggaagtcctcctggataatatcctgaagaatgtttcccagcttggttccattctccccgtcactttcagtacaccaatcaaacgtagatttggtctttccacatagtcccatatttattggaggcttgttcatttctttttactcttttttctctaaacttctcttctcgcttcatttcactaatttgatcttgaatcactgataccgtttcttgcacttgatcgaattggctactgaagcttgtgcatgcatcacatagttctcgtgccatggttttcagctccatcaggtcatttaaggtcttctctacactgttcattctggttagccattcgtctaatcttttttcaaggtttttagcttccttgcgatgagttcgcacatcctcctttagctcagagaagtttgttattaccgactttctgaagcctacttctgtcagctcatcaaagtcattctccatcctgctttgttccattgctggcgaggagctgcgatcctttggaggagaagggatgtcaggtttttggaattttcagcttttgtgctctggtttctccccacctttgtggttttatctacccttggtctttgatgatggcgacctacagatggggttttggggtggatgtcttttttgttgatgttgatgctattcctttctgtgtgttagttttccttctaacagtcaggtccctcagcttcaggtctgttggagtttgctggaagtccactccagaccctcaaacagggatttcttggtgttgcctattctctcccatgtgtttaaatccagggagaggtgtatatatgctttcttcctatttgttggtagtatgttggctagtatttttgcaagaaaagaaattgaaaaagtaaatatattatatcaaaatattgggaaaatggggcccttaatacacaagatctgtgtctgcactgcgtcaagaactctcttcacttgaatgctgcatgtaaaattcaacccaatttatgcaaagtagttgaagccctgtgtcagttctctgtgctgcaagtcatgatggtagtttacagggagagtctgggtgccctgagttggctcatctgtggcaaatgtactgagcacatgctgcccatttttgctctgtccccagagcagtcaccctccaccctgtatttagaaggatagttttatttctcttgaaggaaaaatgcctttggtttctgtgaccactccattctgtctcccatcagatcatctgggaggttttgttgtctaatgtctgttggttaaatgttctatcatccgtgtcctgcctggctcatcaggaatctgcaggagtctgaagaggaggaagtcccccaggagtcctgggatgaaggttattcgactctctcaattcctcctgaaatgttggcctcgtacaagtcttacagcagcacatttcactcattagaggaacagcaagtctgcatggctgttgacataggcagtgagtactccattgtgaaggtgataaagctccagttcatggcccaggtagaccccataatctttgggccttgtgccccttgttgggctgagatttgccatcactgtgggctgaacctatatatcaatgtagatttcaatcactctggagtcgagtctgaagcacaggcatggggtgggtcagtgagctttgctctcttcctagtctcacgccatgcccgtgccaacctggactgactgtcacgatattgaactcaaggcaggtgtggcaaactcacaccaaactatgcagcacatgccc

SEQ ID NO: 812 - DNA, 3175 bp, Homo sapiens
cagaaatgtgattgataacagtaaagccacactcctcaagtgcctgaaatacccctcattgtcttcttcaggtggcaagggctctggaacagccacataaaggtgagggcaatatttttactgtagttctttcattgattggtcgattgattgatttttttctcttagagggttagcatacatttatctgaaattgaaattcaagaggagagacaggcacctgtactagttttctctcgctgcctattatcacattaccacaaaccagtggtttgaaaccacagaagtctggaatgaagcggccgggttctctgatcagagtcatgtgagactaaaatccgggaatgggctggctgtgtttttttcctagagctcaagctatttttccaggttcactacagataatgaaagagttcctattcttgtttgtgggggactgagggccctttttctgtgctggctgtcagcggggagacagtctactctgactccagaggccacgtgctttcctccttacctgtctgtttcatctttcaaccaataacaacttatggagtccttctcaagctcccaccttctctgacttcatcttctccaaccagccacacaaagctctgtcatgtatggagtgatgtgattagatccagttcatgcggtaacctcaccatcttaaagtcatataactggcatataacaatgtagtcacaggaatggtgtctcatcaccttaagaggctttagagacaagggtgtggcatgtttggggaccatttcagaaattccatctaccacagtaggacactcacattcccccatctgcaaagtgcatttaccctctcccctgaggtttccagatttcatgtcattaaagcattagttcaacatgaaaaatgtcatgtagaccacatcagatcaaaagcttaaaatcccatctaaaacatccacaccaggtgtgaatgaggcttccgagagtgtccattaagtgcagatccttgacataattcccttacctctgtcgacctgtgaaactgaacaaacagcttatctgtccctaatgtgaaatgatgggacaggcatagaataacaactacagtgattctagttcaaaatgagggaacatggaggggataaagaagtcactaacccaaaatagtttggaaatggagctgggcaaaatcccgcaggagtttcttagtaaggatccacagcctgggactgaccctctgtcctgtgggtctttgcctctgggctctctgctctgcatttcttgaaaccattattatttatcatttttctcacactgttttgcgtatggctcctattgcactcaaaatgtttttgagattcatccatgttgttttgtgtgtcaaaagtttgttcctttagccattccatggaatgaatgtatcacattcttgtattgatagatatttgaatgtatattgatagatatttgaatacaagaatgtatccattcttgtattgatagatatttgaatgtttccagtttttcctattacgaataaaactgctatggacattcttgtatatatcattttctgcacatatgttttaatttctcttggataaatgcttaggaattactgagtcatagaataggtagttgtttagttctgtaagaatatgccagacgttttttcccaaagtgtttatactattgtacattccaaccattaatgtatgaaggtgagaaagctttcgctacttccaaagaggcctctctatatacatgtaattttttctaactggagacaggctgatgacttcagggacatgagcatgggatacctgtcatcaccaccaccatgaagttgggattcaggaaggagtttaatcatgtaaagaatcctgtgaccagtatgagcttctctcaggccacacagggcactcaagtgaacagggtcatggtaagaaagtgtctcattggtaaaaccttttcctctggggaggtaaataaattatttgtttcttcttggtagcccttgaagataaggatggtcaaacaaaataatatcatacctggagaaactcagatcttgctaagatttactggttgggaatccaaagttaatgccaagaagcagctgccagttgggatcaaatgtgagcctatggatcaaggtgcgtactcaaacacagagagctttctgaaagatgctaccagtagtttttccagggcagagatgtgtcctttatttttctctctaatctagcccatatgcttagctgagttttcttcatatcactttaaatgatgatgtcccttgttcaacaattttctaaacattctttagataataattttatgggcattctttattgcattaggcttaaatttaatgcatcttaaggttttattgcaaaatattgccttgtttcctttttaagatgatacaatttataatatgcaaatttgctgtctgtcccctccctttatgtacatagaaaatgagcaaacaggtggccatgaaacagatggtcatagaattgtttcagtgcttgtgagtgcagcaacccaagagtgtcttatctgaaataccaccaggaatgtctggacacagtagacaaaggtttttcaacaggatgccttaggatacatgcttccaaaaacaaagtagccaaaaagaaaccagagtcacagaatatcagagccagaggaacatttggaggtaattcagtacctcctccttttcagcctacaggggagatagtggaagagaagcagggatgggtctgccttctgtgcccacaattcattggagattgttgtggtgaagaatttcttttatgatgaaggagaaataaactcccatcagctttaattcaggcaggtttattgaaaaggtgaagaagcatcttgcagaagcaaagcatggttgaggcttgtgggctctgtctggacaaatgagcagccgacagtggctggtgctgcccctgactctagggccgtgtggtctgtggttgtctgtgagcatctcttctattctcttgcatcgtccctcagcctggcagtctctgtgtactcttcaacacataattgagtgaggctgtaccagccccaatgccatgtagcactttatgtcaaattagaaaggcatgaaataaactggccctttataatacaactgttggaacaacagttgaaaataacaata

SEQ ID NO: 813 - DNA, 9048 bp, Homo sapiens
attgtcacaagggtacacgaatactgagagtgaatgctgaaggaatgatccccattggtggtgaccctcaggtgagactagggtgcctgtgtttcagcaaagcctgggcaattggaatgcagggctcctaagattccatgacacccctaccttctaattctgttattgcaactgcagacggttacctggcacgctggccacaatctacctcactcttatcagagtctgagcagtgctttcagctctgagttgaggcacctcgaaccttgtttttgtggtgaaggatcctaaagtgctgtggggagtgatcacatttttcacaacagtaagttaagaatttcagttactgacatccctcagtcctgattaaacctatttgatttcaccagtttttaacccatcatatgtttgggtttcttctccccagtccctgactccacctcttctgccacaaacgtcagcatggtggtatcagccggcccttggtccagcgagaaggcagagatgaacattctagaaatcaacgagaaattgcgcccccagttggcagagaacaaacagcagttcagaaacctcaaagagagatgttttctaactcaactggccggcttcctggccaaccgacagaagaaatacagtaagatctataggctcaccatcatgaaagtgatgaatgtgagacactaaatgctctctccatcaaaaataatttcatccttcctgtacttctaggaaaacagaaatgggtattttaacattttgttaaagttggaagacagaggtaccaaagtatttagcaactttccatgtttgcaatcagatgggggtgggactagagttaaactcacagttattgatttctaacacaggcacagaacgacctgttttctccaagaggctcaatcatgttttcaagaatcctctctgtaccatataagatcctgcagacaaataacatctagtctgttgttctaaatgtctaggactagtgaacttttattcagttcaagtttctgttgaggcccaacaggcaaagctctgttctagtgactctgaggggaacttggtgatagtacccagtacctgctctgaggggcttcaagaggagtctgctcctaatagaacctgtgctatctataagtgacagcatcaagagcagggagtaggggccgtgcaacgtggctcactcctgtaatctcagcactttgggaggctgaggcgggcagaggacgaggtcagcagtttgagactagcctgggcaacatggagaaaccccgtctccactaaaaatacaaaaagtagatgggcgtcgtggcgggcaactgtaatcaccactaatcgggaggctgaggcaggagaatcctttgaacccagcaggcagatgttgcagtgagtcaagattgcactattgcactccagcatgggtgacagggcaagactcgtcaaaaaacaaacaaacaaaaagataaataaatcaaaaataaaaataaaaagcagagagtaccttggtgagagtgaagtctgcttcctggtgcacaggctcttgttcctaaagaggaagaaagatcacacccgagaacgtgtggaagcagcagtgcagtgtgcaaagcagggaccctcagcctgtctcctgggctccatccatgttgcttgtcttgtctgtccctcagtttcctcatctgttcagagggtactacaataatgcctacctctgtaaattgctgcaatgaattacatgaggtatttcctgtcgatctccttgaacattaattggcacagtgtaaacactatctattagttcttcattctgatgtttctaaattaacacaaactaatcttatgctgtttctaaattaacacaactaatctaaatcttaatgctgcctctcatactaataaagtatttgggcatattttcttcatggccttattgtcttatgtctcacactttaggcttcagatatgattcttaaaaccatatctgaatattgatttaaaaatgaaatatttttaaagttcttgacatatttgtccttgaaatacccagtaaaagggaaaccatcagtcccatagtcctaggggccttcctgactgtacaagaaatcactacttcatgccccagtgcagtgttttagaggagaggctgcaaggcttgggaaagtggccccgcattcagagtcagacctcaggggctgtgagttctgactccacttcgttgtggttgaatcatcttgtcaacttccttgatgcgcccttgagtttctctttcttcgtctttaaattttggaggatcagatgccagaaagtcagaagactgaagagtaaagatgtggaaatccctgtctagaccctggtactggggagagttttgtccttgggatggacctggctcctgccctgtaggcagtgaccacagcagcatgtccagccttccactgaggcaggcgtgtctgtcttttctcagagtatgaagagtgtaaagacctcataaaatttatgctgaggaatgagcgacagttcaaggaggagaagcttgcagagcagctgaagcaagctgaggagctcaggtgaggggaccccgtagggggagacaggcaggtaggtgtgtagatctctgaagtacagcagctcggcggggagaagtaagaacgaagctgggccaggggaagggcagaaattgccatggcaggctcatgacacacaaatatttatcagagaacaaggataataataagttctgtgttgcagttgtttcttagagccttgttttctctttttcaaacaagtaattgttgaggtgaaacttacataacacaaaattcaccaaaggagtgggaaccacccagcagcattcagtataatcaaaatggtgtgctattgccaccccacttacccttagtgagaatcacctcctgactgactgcgtcttctcattctttcactcaatcaatgttgccttctcgaccctgtcattcttttcttctttcgtcttttcaattcgccccatctgcacctggcctcatttctgtacatggctttgtatctagtggccgcaagatgcactatgtgtattttcacatggaaatgtccatggccagagtgaggaactgaaaggatgtctttttgaaacggaattaggaagacacctacttttatttacagaagggaaagatgaatggaacatcatcgaggatcttgcaggagccctctctgatagagggaaagcctgtagaccattttctgttctttctcttggccacagacattcctttcaacatgtgctgaccttctgcttgaaggtctccttgagaacattgtctcagaaatctctgttgcaatatttgaacggatcactcaatgcttttcactgttaaattttctctaccgtctcaccttaggcaatataaagtcctggttcactctcaggaacgagagctgacccagttaagggagaagttacgggaagggagagatgcctcccgctcattgaatgagcatctccaggccctcctcactccggatgagccggacaagtcccaggggcaggacctccaagaacagctggctgaggggtgtagactggcacagcaccttgtccaaaagctcagcccaggtaaggtggccataggccctgatgacccaaaaccccaggcttatgagaggctccagacctccatactttcacaatgacagttgtatcagtggggtttttttctactacacatatgtggccatgacatgatcaggacttcctgagtaagaacagaaatgggaaacccatcggtttggaggtcacagtattgcaagtgtccctccttccttgatggaaggtggtctttggagcaagaggcagcatctatctagttttaaaggacaggaaggaggctgtgatgggagggcgcttgttggagtgaaaagagctctgggctaagaatgaaggttcccaggctgtctttttggcaatgttcttagtaagtgtcggtgagtgagtgatttatctttccagagtttctctctctccatctgcaaaggcagacaaattgtctcttgcaagggtctgaagcatccaaatatgggaacacttacgaatgcttttcaaaatgagatgaagcccctctccgtgtggtgttggagaaggcacttgatgtgggggcatttggtggtaggaagtgcttcagactggagcactccccatggatagaatgtccctgaataacacagcagaagccacatggagggcctgtgcagtctcatgacgcatagaggactgtgggacaagtttgtcctctcctaagagaatgaatgaggtttgaaatgcgaactgtgacaggacaccaagcctgttcctgggaatcagatctgtggcaggatgggggagacagctgccaaagtccagagagaggctgcacaagcctccagtgatatgggaagcaaaaggtcttttcagtatttggccacatcttgatcagggcattttgtgaaggataaaacatgagagttttcagtacaatgctgaaccatacatagatattcatgtctctgtgcacgttgggctgactgtgcttgcagaatgtgaagtgggaaatatctgaacgaacattttgtatttatagaaaatgacgaagatgaggatgaagatgttcaagttgaggaggatgagaaagtactggaatcatctgcccccaggtaacattgaatactcaggagcaagtaatgggtggtaacatatgaaaatgtctaggaggcacgccctctctggcatctatgatgggccaaaagcccgcattcccttggccacagtatgtgaaattcaacccagcttagacacagggtgcggcagctgttgtgtttctctatgtgtgccaagtgtcatgtctgtaccatacagggatagctgagtcttcatcctcttcagctcctatctgtccagtgcactgaacaccagctgctctcttcctctctggctcccatggcagcgaagctctgttgcagagagaagaggattgcctgttccctcttaaagggaacctccatttgttttctgggaccactctcttaatgccgcttgtcaaaaccagctaggactccttggggtccaatccctctgtgtttaatcttctgtcatctctgtcccacctggctcatcagggaggtgcagaaggctgaagagagcaaagtccctgaggactcactggaggaatgtgccatcacttgttcaaatagccacggcccttgtgactccatccagcctcacaagaacatcaaaatcacatttgaggaagacaaagtcaactcatctctggttgtagacagagaatcctctcatgatggatgtcaggatgctctaaacattctcccaggtagcctctattttccttgtgtctcatacctctgtctaggctatggaagatcaattctgaggacaggctgtatatacacatattgttattgttttagtcagaaactaggatggagctaggtgctgtgactcacacatataatcacagcactttggaaggcccaagtgggaggatgacttgagttcaggagttgaagaccagcctggagtatatggtgaaacccatctttacgaagaatacaaaaaattaggcaggcatggtgctgcccgcctatagtcccaactgctcaggagacttaggtgggaggatgggctgagatgatcctcccaccctcattcacttctgtcaggctagactctctctccttttcattggcttgtcttagctattaataagtcttggctgggcgcagtgggtcacacctgtaatccgagcactttgggaggccgaggcgggtggatcacgaggtcaggagattgagaccatcctggctaacacggtgaaaccccgtctttactaaaaatacaaaaaaaaaagaaattagctgggcgcggtggtgggcgcctgtagtcccagctactcaggaggctgaggcaggagaatggcatgaacccaggaaccggatcttgcagtgagccgagactgtggcactgcactccagcctgggagacagagtgagactgcatctcaaaaaaaaaaaaaaaaagtctctgaccagggacgctggctcacatcttaatcccagcactttgagaggccaaggtgggcggaacacctgagctcaggagttcgaaaccagcctgtccaagatggcgaaaccccatctctactaaaaatacaaaaattagctgtcatgttacttggcgcttgtaatcccagatgcttggcaggctgagtgatgagaatcgcttgaacccgggaggcagaggtggcagtgagctgagattgtgcctctgcactgcagcctgcgcgacagagtgagactccgtctcaaacagaaaacaaaaaaccaaaaaaggaaaaaatttaaaaagcaaaatgaaatcttttgtgctacacagaaacattggccactcatgggataaaaatctcagggccaagccttgctttatagaaacgtataagcaagtgtagaagtgtttatgtcttggtttcaaggtgactgcatagctaagacaagttgacttaaaggagatcaagactggagatgacaagagtgaaaccagggaaacaacatcttcaaataagtaaacaaggctaccagtgacatccctcagtcctgattaagcctatttgatttcaccagtttttaacccatcatatgtttgcctttcttctccccagtccctggccccacctcttctgccacaaacgtcagcatggtggtatcagccggccctttgtccagcgagaaggcagagatgaacattctagaaatcaatgagaaattgtgcccccagctggcagagaagaaacagcagttcagaagcctcaaagagaaatgttttgtaactcaagtggcctgcttcctggccaagcagcagaacaaatacagtaagatctatatgctcaccatcacgaaagtgatgaacgaagtcctgtcttctctctgagaaactaagtgctctctccatcaaaaataatgtcatcctccccatacttctaggaaaacagaaatgggtattttaacattttgttaaagttggaagacagaggtaccaaagtatttagcaactttccatgtttgcaatcaggtgggggtgggactagagttaaactgccatttattgatttctgacacaggcacagaatgacctgttttctccaagaggctcaatcgtgttttcaagaatcctctctgtaccacataagatcctgcagacaaataacatctagtctgttgttctaaatatctgagactagtgaacttttattcagttcaagtttctgttgaggcccaatacacaaagctctgttctagtgactctgagggaaacttggtgatagtagccagtacccgctctgaggggcttcaagaggagtctgctcctaatagaacctgtgctatctataagtgacagcatcaagagcagggagtaggggccgtgcatggtggctcactcctgtaatcccagccctttgggaggctgaggcgggtagagcacgaggtcaggagtttgagaccagcctgggcaacatggagaaaccccatctccactaaaaatacaaaaagtagatgggcgtggtggcaggtgactgtaatcacccctgctcaggaggctgaggcagtagaatcctttgaacccaggaggctgaggttgcagtgagccaagattttgccgttgcactccagcctgggtgacagggcaagactgttaaaaaaaaataataatgataaataaaaataagaataaaaagcagagagtagcttggtgagagtgaagtcctgcttcctggggcacagagtcttgttcctaaagaggaagaaagatcgcacccgagaatgtgtggaggtagcagtgcagtgtacagagcagggaccgtgggcctgtctcctgggctccatccaaggtgcttgtcttctctgtccctcagtttcctcacctgttcagagggtactacaataatacctacctctgtaaattgctgcagtgaattacatgagctatttcttgtcaatctcctagaacgtttattggcacagagtaaacactatctattagttcttcattctgctgtttctaaattaacagaaacttcattagcatttgggcataggatttccttcatggccttatggtgttatgtgtcacactttatgcttcagatatgattcttaaaatcataactgaagatatgattaaaaaatcaaagatttttaaaatctttcacatacttgtccttgaaattcccagtaaaagggaaaccatcagtcccatagtcctaggggccttcccgactgtacaagaaatcactacttcatgccccagtgcagtgttttagaggagaggctgcaagtcttgggaaagtggccccgaattcagagtcagacctcagggactgtgaattctgactccacttcgttgtggttgaatcatcttgtcaacttccttgatgtgcccttgagtttctctttcttcatctctaaattttggaggatcagatgccagaaagtcaggagactgaagagtaaagacgtggaaatccctgtctagaccctggtactgtggagagttttgtccttgggatggacctggctcctgccctgtaggcaatgaccacagcagcatgtccagccttccactgatgcaggcgtgtctgtcttttctcagaatatgaagagtgcaaagacctcataaaatctatgctgaggaatgagcgacagttcaaggaggagaagcttgcagagcagctgaagcaagctgaggagctcaggtgaggggaccccatgggggcaggcaggggggcaggtgtgtaaatctctgaagtacagtagctcagtggggagacgtaagagctaagctgggccaggggaagggcaggaattgccatggcaggtttgctacacacaaatatttatcaaacagagaagaaggataataaaaatttatgggttgcagttgtttctcagagccttgttttctctttttcaaacaagtaattgttgatgtgaaatttacataacaca

SEQ ID NO: 814 - DNA, 8115 bp, Homo sapiens
ctgattccctcggctggtgccagtgcctgctcctgccatggggcccgcggggagcctgctgggcagcggacagatgcagatcaccctgtggggaagtctggctgctgtcgccattttcttcgtcatcaccttcctcatcttcctgtgctctagttgtgacaggtgagaaccagagtgtatatacctgtgccttaaactaatacatcccctgtacccagaagagtttctgtggaaagcctgttaggaatggaatcccgccacagagccgtcccagaaacttgtgcattagctttaactctcttctctctgctgcagagcgtctcgggacattctttattcactgaaggaaaacccatatttggttttgctagggagcaactagaagagcccttatattttaaacttcccagaatgaaagtcttgctgttctttcgatcacacccttgtcaaaatggattttgtcttttttcatgtgcgggcattttgaaatcttgtgtgatgcgcatctttttgccaccaccctgcggaagtcacagaatgtttgctgctacgtgatttcggagggattgtttatgattaaaaatgtgtagtgtagaccttcagtttctcaagaaacagattattttccaaggagaggaacatgctgtatatgaaataatcatcagtgtcctttttttagagttatacttctctctctcctctgtctcatataaaatgtcagtacccccaacaagagaaatctttgctcagagagaagttctttctaaccagaagtgatgtttcaggacattctggaactgttacaaagcacataaccttctgataggctagatgccaccagaggcccatgcagaccagctgaccgtcagccagccctgtccaaactctccctccaccatggaagcaactccaggagcgtcacttaaaattctgaaatagcttcctaccctaaaatctgtcaggaggagaaaagccaagaccctctgaacccagctagcctcctaatccctgcccagcctggacccagacctctgtggctgggacagagtctgaatgattgggaagatgaacaaagaggccgcagggccggggcttcccggggcctggacggcctgcttctgtagttactcatgttcccactaggtgtcacccttgttttatagagaacgtggatgggcggcgtattctctacaactgatggctttctttagactgtcccgagtaaaaacaaattctatttttacttgacagactttcccatagactggaagtacatatgactcaccctgagagcatgtacccttcctggcgtgccaaaaatctgtattttctccatcccactgcagtgtgtgactttgcagagactcagataattgtcttcattttctcaaaaaaaaaaaaaaaaaggtataacttactctgctagtttaggtataaacaatttctacgcaggcccaggcctcggtcctctccttgtgaacttgtatgttttttcccggaagaaggggtgccaggggaggtggacagtccctagttgaggcttgaactcctcttccccagcacctgcaaacgggccatcaaatcactgtctgattttgtctttgttgacaaaataaacatggttcttaaaacgagagatttaaaagctgataagaattgggataggaaagggtagtgtgcgcttgattttaagggggcacatttgacattacaacatttcacttttcatttcagggaaaagaagccgcgacagcatagtggggaccatgagaacctgatgaacgtggtgagcctgcgcgtgtcgtctgcctgtctgtccgtgcgtgctccagaacatcagctacttatctaagtgtgctcccatgtgctcacagcctgagtagaacccacggggagagctaagcctaagttaaacggtggcttctgaaatggatgcagtagtgctgctgccggaatgatccttaaatggctccaacctactgcagggatgggacttttttgcctctattaatttgctagtgctgtcataacaaaggaccgcaaacagggtggcttaaataacaagtttgtttctcagttctagaggccagaaatccaaaaatcaaggtgttggcaggattggttgcttctgagggaaagtctgttctaggcctctcctggggcttctggtggtttgcagccaaactttgggtgtgacttggtttgtacaggcatcaccccaaattctgccttcatcttcctatggtgacctctgtgtttcacatcacctcccatctatgtatggctggctgtgtccaagtttccccattttataaagacaccagacatattggactagtgcccaccctactgtagcacgacctcatattaactagcttcgtctgcaatgaccctatttccaaatgagaccatattctcaggtgctgggggttaggacttggacatgaattttggagagacacagttcaacccataacaacaggtcattaagctggagggagcttgggacccacaacaccctaggtatataacctagccttgctggcgttttcccagccctcagtatcttacagggtcctgatgatcctgaggccctcagggatccaccctggcgaggaacagcctgagagtgtccaggtccttccttgtcctctctgacccaggcccgtgcttttgaatggctgagcagtcccagccgctggggagggggcccatcgtcacattagcaaggcagagttcagaatctgccctgagtcctgtggcagtgctaagacagaagatgcttcttgttcaggacatcatttctcaaggtcaagcaaaaactggttgggaggagagggtgcaaacaaggaagcatggatgagccaaggtctggcgtaaaacccgcagccagcagacgtttgcagagatgaccaggggcatctccagtctaggcttcctgacctgccaattctcaggactcctctggcccaagcaggcaggaagttgtcaggactccccgttcctcctgggacccccaggattttccttccctcccctctgcatccacatgcccacctcacccttcgcagctttcctgggccctcatcaccactcctccctttactctgtttctcgccctgttcccatccctggttgtccacattgtcgccacttctcatctgttcccagcgcccctgctctgcctggtgattgctgctgtggtggcctcagcagggagggtgggagggatggagggaacgccccactgtcgcttctccccatgcagactccaggcccctgcctttcgtcactccaccattctcctggtgccagttgggtggtgaggtggggctggggaagggctcccaccgccattcctcacttccttctagagcaggggttcttctgcagtgtggcctggacctccacccacagcagcagcagcacctgggagctccttagaaatgcgaattttcctgggggtgaggcccagtaaaaggctcgcaagcaccccaggtgatccagttgtatgctcgagtgtgagagccactggcctagagcttgggttcccgctgttctactcaaggtcagcagcagccctgggcgagataggaagagagtggcaggtggataaaaggaaaaagctggcttccatcccctgccttcttcctcatccaccatataattcattattgccccaacccatagcctcatttatatggatgtgaatgtctgtgagagagcgcgagcacacacaggaacgcatgcttacccggacactggcacccatgtacacacgctcgcccacccagctctccttaagagcttttcagctcctagatcttatacaacttgcggattcttcatctcatagaagcaaagattaggaatagtagttagagtctagattatggtaacttcagctgtgatcgattatgctgttatgggcccacctgggagtcttccttccccacacccatgcctgcccatttataacatcatttctgggatattagcacctgcattgcaagttcctggcaacctaacacagtgacccatctcactgggggctcatcagacgtgaatgagctgcattggatggaaacagctgacttccaatacacttttggatcattgcacagcatgaactatctgctgtgtattactggcttccaatcaagagtcagagaatttgtgaggccaactagcaaaggtttgtgtgctgtttacatcacaactttccttgtagaatcctggagcatgagatagcctcttggaacgtgcaggctgtgagaagaacagggagcaaatcacatttgcagtgatttgggctgcaacctgagacaagttgggtatttaaagaaatacatgaacaccaacttgctttctgactactcttagctatagctgagccaggcatattgttctaggtagcatctacacattctatccctgcagaaaaccaactattgatgccattcttccctccaaatgtcctaagtttatttgtaagaataagaaagatttgcagagctgggcacagtggctcacgcctgtaatcccagcactttgggaggctggggtgggcatatcgcttgaggccaggagttcgagaccagcctgagcaacatagcaagatcccatctcttatgggagcagccagacatagtggtgcatacctgtagtcccaccgattccagaggctgaggcaggaggatctcttgggcccaggagtttgagacttcagtgagctataatcatgctactgcactccagcctgggcaacaaggtgagacctcatcttaaaaaataaataaataaataaataaaaagtttgcagagctaattttcagcatattattgtttctgtgaacctagcagccagaggctttgctggttctaaaatagtttcagaaatcaatagccttatctatctctgaccagatttaagtctgttcccttcacatgacaaagggtgatgcctttccacgtttctcatagcatggcacacctttaccaataatgatttacagcacctgtgttgtaaggatgaggctgctgtggtctttttcaaccagttcccttcctgccttgagctaagggaattgatatctcacaacctgcctatagccctgtgtaggtcaccaggcaggaagctctgcacatggctttggaagattcccagtgcccctaagattctgggacaacagtgtctaatagaactttctgcagtgctggaagtgttctgtatctcctattggatatggtatccactggccacatgtggctattgagcgcttgaaatgtgactagtcaacaaggaactcaatttagtgtattttattttacttaatttaaatctaaaaacagtagctccccttaatctgtagttttgatttctgcagtttcagttacccacagtcaaccacaatccaaaaataggtgagaaccatacaagatattttgagagaaaggaagagcacattcacataactttcattatattatattgttttattgtcagtggttattgttaaattactgtacttataaattaaacatcatcataggtataacatatatggataggaaaagacatagtctatatagggttcagtactactcatggttttaggcatccactgggggtcttgaaatgtaccctctgtagataaggggggactattataggagattctgttttctgtttctgctgttttaattttttgaaaaagccatggatcttctcctctgctctgcagtccagattcttagcaatgtgatgcatttgtttttgtttttgtttttgttttcagccttcagacaaggagatgttcagccgttcagttactagcctggcaacagatgctcctgccagcagtgagcagaatggggcactcaccaatggggacagtaagttctgcaaaaacaccagctttccacacaggcctcatcacctctggaagtcctaggtttcaaaatacatagctcaaaaagtaggaaatgtgttattgctcagttttagtattcctagcagttttagcagaacccctcatttggatgaatactgctacttattaatccacttctgtgtgccaggcattgttctaagactggtacatgtactaattcatttgctcttttagtacattttagtacatttacatgtactaattcatttaccccacgagattactgttattaataataacactactctgtaagataggtattattactcctcacaatttaaaggtgacaaaactgggcacattgctgctgtaacaatattaccacaaacctcatgccttaaaataacaatttattgacttgcaattctgaggtcaggagtctgaaatgggtctcactgggctaaaatcagggcatccgtaggcctgtggtccttcctgaagcctcaaggagaatccattggcctctccctcattcttcacatccctctctgaccctcccccctccctattcacttatagggacccttgtgattacactgggcccacctggataatccaggcttccctctcatccgggagtcatctaattaacagccttaattccacctgtagccctaatccctccataccctccacaaaacattacacattcacaagttccaggaattaggagacagacatttttcagggtcgttctgccttccacagagatgttgctaatttgcctgatatcatatagtcagcgggctaaggatctgtagttggaaccaggcagtctgatccctgggcacgcactcagtcactctgcataacctctgcatcatgcattgtgtactcttgctgatggaaggagcagctaggtttccttcatgctttagagtttacaccatgcttttacctgaggtaagagggcgtcctgttacccctgtttactgatgaggaaactgtggggtaatcaggacaccagtgcctgttctctgtctaccatgatgtagacaactagaaccagagagcaaaagttcaccccctccgtgatgatcagggatttagaacacacaggggtgttggtaagttcagaaggattgggggatccgttgtcattttttcacataccccttggaaacactatttctaattcccccagagtgagacactaatggaataacttgcttactttgtgtctgcatcctaagggcagggctttctgtttcattgaatgatgtgtctgcagcaccctgcaccatccctggtgcatggcaggcactcacaacacggttgacaaagggacgactgaacagcttcacacaatagcatatctgtggctggccaagaatttcacatttggtttttttctaatttgaggtaggaatgttggtggcgggatgagatggaagcaaggtatgaggtgccagtccctttgtgctaatggctgacgggtgcatgtttgccctgtagtttctattatgtctgccaaacaaaagtcacctgtgtgaaagggggtggctaccaataattccctccacacaggcaggggtcagtggtgctggggactgtggtcactgcacatgctgcctttctggtgtccagcctcccatagttcagcggcatcaaactggtcatcttctggtcacattggacaatctgcctacaagagtctctcattggagtgacattaaggaaagtaattgtgaactacacttagagccaagataacttattaaatcttgtattgggaaagatataatgaacagctttattttaaactgtgattgaagtaggataccaactgatggtcataacaactataatttgtgcctgagacttaaataaaaagcacgcatcttgatttaacctaactttatattacctgattctcggtaataattattgaaagacttgcctttctccgcttttaatgtgtgtgctgctttagttctttcagaggacagtactctgacctgcatgcagcattacgaggaagtccagacatcggcctcggatctgctggattcccaggacagcacagggaaaccaaaatgtcatcagagtcgggagctgcccagaatccctcccgagagcgcagtggataccatgctcacggcgagaagtgtggacggggaccaggggctggggatggaagggccctatgaagtgctcaagg

SEQ ID NO: 815 - DNA, 8116 bp, Homo sapiens
ctgattccctcggctggtgccagtgcctgctcctgccatggggcccgcggggagcctgctgggcagcggacagatgcagatcaccctgtggggaagtctggctgctgtcgccattttcttcgtcatcaccttcctcatcttcctgtgctctagttgtgacaggtgagaaccagagtgtatatacctgtgccttaaactaatacatcccctgtacccagaagagtttctgtggaaagcctgttaggaatggaatcccgccacagagccgtcccagaaacttgtgcattagctttaactctcttctctctgctgcagagcgtctcgggacattctttattcactgaaggaaaacccatatttggttttgctagggagcaactagaagagcccttatattttaaacttcccagaatgaaagtcttgctgttctttcgatcacacccttgtcaaaatggattttgtcttttttcatgtgcgggcattttgaaatcttgtgtgatgcgcatctttttgccaccaccctgcggaagtcacagaatgtttgctgctacgtgatttcggagggattgtttatgattaaaaatgtgtagtgtagaccttcagtttctcaagaaacagattattttccaaggagaggaacatgctgtatatgaaataatcatcagtgtcctttttttagagttatacttctctctctcctctgtctcatataaaatgtcagtacccccaacaagagaaatctttgctcagagagaagttctttctaaccagaagtgatgtttcaggacattctggaactgttacaaagcacataaccttctgataggctagatgccaccagaggcccatgcagaccagctgaccgtcagccagccctgtccaaactctccctccaccatggaagcaactccaggagcgtcacttaaaattctgaaatagcttcctaccctaaaatctgtcaggaggagaaaagccaagaccctctgaacccagctagcctcctaatccctgcccagcctggacccagacctctgtggctgggacagagtctgaatgattgggaagatgaacaaagaggccgcagggccggggcttcccggggcctggacggcctgcttctgtagttactcatgttcccactaggtgtcacccttgttttatagagaacgtggatgggcggcgtattctctacaactgatggctttctttagactgtcccgagtaaaaacaaattctatttttacttgacagactttcccatagactggaagtacatatgactcaccctgagagcatgtacccttcctggcgtgccaaaaatctgtattttctccatcccactgcagtgtgtgactttgcagagactcagataattgtcttcattttctcaaaaaaaaaaaaaaaaaggtataacttactctgctagtttaggtataaacaatttctacgcaggcccaggcctcggtcctctccttgtgaacttgtatgttttttcccggaagaaggggtgccaggggaggtggacagtccctagttgaggcttgaactcctcttccccagcacctgcaaacgggccatcaaatcactgtctgattttgtctttgttgacaaaataaacatggttcttaaaacgagagatttaaaagctgataagaattgggataggaaagggtagtgtgcgcttgattttaagggggcacatttgacattacaacatttcacttttcatttcagggaaaagaagccgcgacagcatagtggggaccatgagaacctgatgaacgtggtgagcctgcgcgtgtcgtctgcctgtctgtccgtgcgtgctccagaacatcagctacttatctaagtgtgctcccatgtgctcacagcctgagtagaacccacggggagagctaagcctaagttaaacggtggcttctgaaatggatgcagtagtgctgctgccggaatgatccttaaatggctccaacctactgcagggatgggacttttttgcctctattaatttgctagtgctgtcataacaaaggaccgcaaacagggtggcttaaataacaagtttgtttctcagttctagaggccagaaatccaaaaatcaaggtgttggcaggattggttgcttctgagggaaagtctgttctaggcctctcctggggcttctggtggtttgcagccaaactttgggtgtgacttggtttgtacaggcatcaccccaaattctgccttcatcttcctatggtgacctctgtgtttcacatcacctcccatctatgtatggctggctgtgtccaagtttccccattttataaagacaccagacatattggactagtgcccaccctactgtagcacgacctcatattaactagcttcgtctgcaatgaccctatttccaaatgagaccatattctcaggtgctgggggttaggacttggacatgaattttggagagacacagttcaacccataacaacaggtcattaagctggagggagcttgggacccacaacaccctaggtatataacctagccttgctggcgttttcccagccctcagtatcttacagggtcctgatgatcctgaggccctcagggatccaccctggcgaggaacagcctgagagtgtccaggtccttccttgtcctctctgacccaggcccgtgcttttgaatggctgagcagtcccagccgctggggagggggcccatcgtcacattagcaaggcagagttcagaatctgccctgagtcctgtggcagtgctaagacagaagatgcttcttgttcaggacatcatttctcaaggtcaagcaaaaactggttgggaggagagggtgcaaacaaggaagcatggatgagccaaggtctggcgtaaaacccgcagccagcagacgtttgcagagatgaccaggggcatctccagtctaggcttcctgacctgccaattctcaggactcctctggcccaagcaggcaggaagttgtcaggactccccgttcctcctgggacccccaggattttccttccctcccctctgcatccacatgcccacctcacccttcgcagctttcctgggccctcatcaccactcctccctttactctgtttctcgccctgttcccatccctggttgtccacattgtcgccacttctcatctgttcccagcgcccctgctctgcctggtgattgctgctgtggtggcctcagcagggagggtgggagggatggagggaacgccccactgtcgcttctccccatgcagactccaggcccctgcctttcgtcactccaccattctcctggtgccagttgggtggtgaggtggggctggggaagggctcccaccgccattcctcacttctttatagagcaggggttcttctgcagtgtggcctggacctccacccacagcagcagcagcacctgggagctccttagaaatgcgaattttcctgggggtgaggcccagtaaaaggctcgcaagcaccccaggtgatccagttgtatgctcgagtgtgagagccactggcctagagcttgggttcccgctgttctactcaaggtcagcagcagccctgggcgagataggaagagagtggcaggtggataaaaggaaaaagctggcttccatcccctgccttcttcctcatccaccatataattcattattgccccaacccatagcctcatttatatggatgtgaatgtctgtgagagagcgcgagcacacacaggaacgcatgcttacccggacactggcacccatgtacacacgctcgcccacccagctctccttaagagcttttcagctcctagatcttatacaacttgcggattcttcatctcatagaagcaaagattaggaatagtagttagagtctagattatggtaacttcagctgtgatcgattatgctgttatgggcccacctgggagtcttccttccccacacccatgcctgcccatttataacatcatttctgggatattagcacctgcattgcaagttcctggcaacctaacacagtgacccatctcactgggggctcatcagacgtgaatgagctgcattggatggaaacagctgacttccaatacacttttggatcattgcacagcatgaactatctgctgtgtattactggcttccaatcaagagtcagagaatttgtgaggccaactagcaaaggtttgtgtgctgtttacatcacaactttccttgtagaatcctggagcatgagatagcctcttggaacgtgcaggctgtgagaagaacagggagcaaatcacatttgcagtgatttgggctgcaacctgagacaagttgggtatttaaagaaatacatgaacaccaacttgctttctgactactcttagctatagctgagccaggcatattgttctaggtagcatctacacattctatccctgcaggaaaaccaactattgatgccattcttccctccaaatgtcctaagtttatttgtaagaataagaaagatttgcagagctgggcacagtggctcacgcctgtaatcccagcactttgggaggctggggtgggcatatcgcttgaggccaggagttcgagaccagcctgagcaacatagcaagatcccatctcttatgggagcagccagacatagtggtgcatacctgtagtcccaccgattccagaggctgaggcaggaggatctcttgggcccaggagtttgagacttcagtgagctataatcatgctactgcactccagcctgggcaacaaggtgagacctcatcttaaaaaataaataaataaataaataaaaagtttgcagagctaattttcagcatattattgtttctgtgaacctagcagccagaggctttgctggttctaaaatagtttcagaaatcaatagccttatctatctctgaccagatttaagtctgttcccttcacatgacaaagggtgatgcctttccacgtttctcatagcatggcacacctttaccaataatgatttacagcacctgtgttgtaaggatgaggctgctgtggtctttttcaaccagttcccttcctgccttgagctaagggaattgatatctcacaacctgcctatagccctgtgtaggtcaccaggcaggaagctctgcacatggctttggaagattcccagtgcccctaagattctgggacaacagtgtctaatagaactttctgcagtgctggaagtgttctgtatctcctattggatatggtatccactggccacatgtggctattgagcgcttgaaatgtgactagtcaacaaggaactcaatttagtgtattttattttacttaatttaaatctaaaaacagtagctccccttaatctgtagttttgatttctgcagtttcagttacccacagtcaaccacaatccaaaaataggtgagaaccatacaagatattttgagagaaaggaagagcacattcacataactttcattatattatattgttttattgtcagtggttattgttaaattactgtacttataaattaaacatcatcataggtataacatatatggataggaaaagacatagtctatatagggttcagtactactcatggttttaggcatccactgggggtcttgaaatgtaccctctgtagataaggggggactattataggagattctgttttctgtttctgctgttttaattttttgaaaaagccatgtatcttctcctgtgctctgcagtccagattcttagcaatgtgatgcatttgtttttgtttttgtttttgttttcagccttcagacaaggagatgttcagccgttcagttactagcctggcaacagatgctcctgccagcagtgagcagaatggggcactcaccaatggggacagtaagttctgcaaaaacaccagctttccacacaggcctcatcacctctggaagtcctaggtgtcaaaatacatagctcaaaaagtaggaaatgtgttattgctcagttttagtattcctagcagttttagcagaacccctcatttggatgaatactgctacttattaatccacttctgtgtgccaggcattgttctaagactggtacatgtactaattcatttgctcttttagtacattttagtacatttacatgtactaattcatttaccccacgagattactgttattaataataacactactctgtaagataggtattattactcctcacaatttaaaggtgacaaaactgggcacattgctgctgtaacaatattaccacaaacctcatgccttaaaataacaatttattgacttgcaattctgaggtcaggagtctgaaatgggtctcactgggctaaaatcagggcatccgtaggcctgtggtccttcctgaagcctcaaagagaatccattggcctctccctcattcttcacatccctctctgaccctcccccctccctattcacttatagggacccttgtgattacactgggcccacctggataatccaggcttccctctcatccgggagtcatctaattaacagccttaattccacctgtagccctaatccctccataccctccacaaaacattacacattcacaagttccaggaattaggagacagacatttttcagggtcgttctgccttccacagagatgttgctaatttgcctgatatcatatagtcagcgggctaaggatctgtagttggaaccaggcagtctgatccctgggcacgcactcagtcactctgcataacctctgcatcatgcattgtgtactcttgctgatggaaggagcagctaggtttccttcatgctttagagtttacaccatgcttttacctgaggtaagagggcgtcctgttacccctgtttactgatgaggaaactgtggggtaatcaggacaccagtgcctgttctctgtctaccatgatgtagacaactagaaccagagagcaaaagttcaccccctccgtgatgatcagggatttagaacacacaggggtgttggtaagttcagaaggattgggggatccgttgtcattttttcacataccccttggaaacactatttctaattcccccagagtgagacactaatggaataacttgcttactttgtgtctgcatcctaagggcagggctttctgtttcattgaatgatgtgtctgcagcaccctgcaccatccctggtgcatggcaggcactcacaacacggttgacaaagggacgactgaacagcttcacacaatagcatatctgtggctggccaagaatttcacatttggtttttttctaatttgaggtaggaatgttggtggcgggatgagatggaagcaaggtatgaggtgccagtccctttgtgctaatggctgacgggtgcatgtttgccctgtagtttctattatgtctgccaaacaaaagtcacctgtgtgaaagggggtggctaccaataattccctccacacaggcaggggtcagtggtgctggggactgtggtcactgcacatgctgcctttctggtgtccagcctcccatagttcagcggcatcaaactggtcatcttctggtcacattggacaatctgcctacaagagtctctcattggagtgacattaaggaaagtaattgtgaactacacttagagccaagataacttattaaatcttgtattgggaaagatataatgaacagctttattttaaactgtgattgaagtaggataccaactgatggtcataacaactataatttgtgcctgagacttaaataaaaagcacgcatcttgatttaacctaactttatattacctgattctcggtaataattattgaaagacttgcctttctccgcttttaatgtgtgtgctgctttagttctttcagaggacagtactctgacgtgcatgcagcattacgaggaagtccagacatcggcctcggatctgctggattcccaggacagcacagggaaaccaaaatgtcatcagagtcgggagctgcccagaatccctcccgagagcgcagtggataccatgctcacggcgagaagtgtggacggggaccaggggctggggatggaagggccctatgaagtgctcaagg

SEQ ID NO: 816 - DNA, 2836 bp, Homo sapiens
gcagaattttggaaacaaacatccagaaaaaagagagagagaccaggagagaagggtagcagtgcacagatcttctccaaaatgggaaccgtccaccaaggacgtctgctgtaaggatcaaagattatgttagtctagatcccctcagccaccactcctcccacctccccaccaccaacactcacacactctgccaggcccctaaagaagagtaggtggcagttgctggtgcagccactcaacccgccagcactgcccacgaccacggggactggtgtcccacagtcctcctgcagagcagcacttagagggtccaagaggagaaagctgcccccgcaactggggcctttgtccctgaggactgcagtgcatctgactcagaaacgtgcacctgatgatgatcattctgttcgctgtgagaattttgtccacagtaagaacttgggaaaaagtctttcagtggctttatagacaattctaattgaaggggagtgagccaggagtttcaacacattttctcttggttccatcctttattccacagcttgtaataatcccctttcatcctctttctccctgcactgtactaataggctgggcatcccacatctctcatcatattctactgacctccttctattaggagagaggagagagagaagagaaacatgtacagaaaggagagagttgttggcgattccacactaggtttcatgaatggatatctggcttttgaataactcacacagcaaactctttttaagaacatggcattttataaatgggcatcaattaatctgttgtatgaatgaatgaagaacaaacagatgcctgcacaggagatagataccttttgtctgtgattcctaaaatgttgtatgctttggacctgtgtataaaaatgtattttatatattttcattggtcatcatgatttagctgcttgcttgaatgtattttaaaacctattgtggtgccaatttgtagtctcagtttaaagtgaattattctttgcatcaacaaatcacagaagtggtggttattttcatttgtttatagctgtctgggggcaaacatgcaaagtaatttgacttgttattactgtacgcctgtcgtgtttacaggcacaatatacatacaatcaaacataggaagaaagaagttctgtattacgcagggagtcctgcatttatataattatagagccttagaagacgttcatgttgattcaaagattgaggaaaacaacttcatctctcagaactctctctgcatacattgtaggtaaaagtctctttttcttcagctttttaatattctttaactttgaatattcaaataaatgtgacagtgtttcacctggagatgatttggtccaattgaaccacatttgccaaaatggcttttattctccccgttttaggaggcaccctggtttgctgcgaagccacccctgccgtcttgatgtctgtgctcagggatggctgaaaacagtcacagctttatcactgaagcaaacgaaaatgtaaatactttttcaaagaagatattgcactattatcaaaaaaccaaagtatttgcttattcatgacacttgagaccaacttaaaggctatttcttttcatttagaatgttctagaattgagcaaagcaaatattctttaaacaaggcctctgtgatgacagatcatttgatatacgactccatttttaaaatatctgtagctcttaaaatatttcacacaaggaatctgaccatttctgtttcgaagtattgggacagggtgcagtgaccctgtgagtcccagcatccccacagtgacaacgagctttccttgatggacacagagcacaggctttggagtctgagacagctggactcatccctccctgccacttagctcctgtgacactcaggggaagtcaccgctctgctgggatttagcttccatctctgtaaaagggggattaacagtgcctcctacacagggtggtgacagcaattaaatgaggaaagcatttagcagaatccctggtacataccaggtacggaaatgtactaggtagagctcttatgcttctcttgcaattgtttataaataggtcttatttattcccagggatgtattcttagcacatacttcattcattcatttgaaaatgcatttattgggtactcacagcagggtagtgtaaacatactcagaatacataacatactcagaataaataaatgcaggtgaatataaagacattctatttcattagttacattgaccttaaaccttctcagacaacagtgggtgagggagatgagagatggcagtgggtagggagatgagagatggcagtggattagggagattagagatggcagtgggttagggagatgagagatggcagtggggggcaggggcaggtgatgagttgcatttttgcaaaagctatataagaattgttatatactgttctgattttttttaatgaacctaaatgagcatggatttatttgctatggagtacttgaaatctttatttgaagacattaagaatccatccaggccaggtgcagtggcacactgtaatcccagcactttgggaggctgaggcaggaggattacttgagcccaggagtccaagaccagtgtaggcaatatggtgagacttcgtctctacaaaaaataaaaatattagccaggaatggtggcgcatgcctgtagtcccagcagtggggggcaggggggtggttcaggagaggattgcttgagcccagggaggtcaaggctgcagtgatccatgattgcgcccctgtactctgggcaacagagcaagacc

SEQ ID NO: 817 - DNA, 512 bp, Homo sapiens
gatcaaggaggtggctgcagctgcacacctggagaaaggccacagtggcaaggcaaaatctacttctgcctcgaaagagctcccagggccccagactgaaggcaaagctgagtttgctgaatatgcctcggtggacagaaacaaaaaatgtcgtcaaagtgttaatgtagagagtatccttggaaattcatgtgatccagaagaggaggccccaccacctgtccctgttaagcttctggacgagaatgaaaaccttcaggagaaggaagggggagaggcggaagagagtgccacagacacgaccagtgaaactaacaaggtgggcactggcgtttttgttttgtctttgtgggttcctgttctggttaggaatctagctggccctggagttgttctgggaaatatctgcaaacactttccagtttgttgaatgatgagagctgttttcatgtaagctgtgtttggctttttccccctccaagtaataaaataccaaaaacttgtatttatca

SEQ ID NO: 818 - DNA, 10937 bp, Homo sapiens
gatcaaggaggtggctgcagctgcacacctggagaaaggccacagtggcaaggcaaaatctacttctgcctcgaaagagctcccagggccccagactgaaggcaaagctgagtttgctgaatatgcctcggtggacagaaacaaaaaatgtcgtcaaagtgttaatgtagagagtatccttggaaattcatgtgatccagaagaggaggccccaccacctgtccctgttaagcttctggacgagaatgaaaaccttcaggagaaggaagggggagaggcggaagagagtgccacagacacgaccagtgaaactaacaaggtgggcactggcgtttttgttttgtctttgtgggttcctgttctggttaggaatctagctggccctggagttgttctgggaaatatctgcaaacactttccagtttgttgaatgatgagagctgttttcatgtaagctgtgtttggctttttccccctccaagtaataaaataccaaaaacttgtatttatcaaatatttctctcagcaccttacttggatattttcacattttttccatcatgtctaattagggccaaatcttgtttgcttcattttgatgtccacaaattaaatacagaaactggacactttgcccacacattttacccattctgcttgttggctgcctcagcagcatggtgacctttccccttccaggatccccaaaaatcagcatgcatagcaacaggtaccatgggaaccaactcacaggtgcccctggttatatctgattgtacaaaccttcatataaatcagtaggagatcttattttgtgaccctttctaaactatagcctatacttcctaaatttagatattcaacaaagctgtaaaatgcattagcaatccacaccttctgcatgtgtctgataacttgatatctgagccacgatgaagttcacatccctggttgttaaaatctctttgggatttaactaggcccatctacttcaggcaactaataattaatttctgttttctacacagaaaaagaggaaggttctctcttctattcagttttagtaggaaggacaagtagcaggttagccagtcactagtagccttaaaaaccttccgtagttcatggccagaggtgaaccctcactctgtttgtataaattagaccaagaaaatcattctttgtgctgttctctgaatgcatttcaacttttcatattatccatgaaatcagctgttgagagcaccaataaaagggtttatgaacatgttcataaaatataaaaatgcagtccaattttttgcccttcatagaaccaaagaccataaacctgatgtaaagttcatgctgcctaaaccagacaaagctttttacttacaagcattagaaagataagacgttgagttgtctaaccattgctagtaaacagttctccagatttcacgttaaaaactggaaataatcatctggaaataaaattatccttccacaatatagtaaaaatgagtaatccatcatctttatataaacaaccctaattttaagtgagttgagggtttgaagtatttaatattcattcatttatttaacaaaagatcttaataagcacctgctgtgtgccacacagtcttctagtcctggaaacaaaacatgtacatgaacaaaatccctgccctgtggaacttacatcttagtgggaagagacagacataaagtttaaagtttataagagaaaaaaatagaaccgaataaggggaactgagaaaacaggtggggagtacagttttggatagagtggtcagggtctgcccagctatgaaggtgacgtttgagttaaaggatccaagggggtgaggtttgtgcttttgtggaaagagcacgtgaagcagaggggatgcccagtgtgaggcccctgaagctagagcttgcaactggctttttaagggaagaggaggggactgctgtgggtggagagggaagagcaaggacagcagtgaggagaaagagaaccagagctcgatcctggatggccttggcttatagtctgaacactaataatgtcactagagtcccgagcagcagaatggcacaacctagcctatgttttcaaaggatccctctgactccagttttgaaataaagggtagaagtgaggagaacaattgggtagtgactctaataaaccagattagaaatggcggtggcctggatcagggaagaggcagcagaggtgatgagaaaagctaagccagagccaagagatttgcggatggatcctacgcttagtgagataaagaagaggcagtgatgagtacgaggctgggcccaacatgtgggaaagattgaattgccattaactgaaatgaagaggatacaggcagagcaggttttggggggagaaccagcagtcagtgttgggtacgttcaacttgagataccgattggacttccaagtagagcttatcagatggtagctggattgatgagccgggtaaagaggaaaggccagggctggatttgctgatgtgggagtcatccacagaatgtggttttaaaagtcatgagattgggtgaggtcacaggataggtgagtgtaaatagagcctggaagagctccaagaatagagatctggaaaaggaaccagcagaagagaccaaagtaggaaacaaaaacaggaaagttgtggagtcctggaaggcagtgaagaacgtgtccaggaaggaaggagtggcgggccgctctgccaaatgcagcgggtaggtcagggaaggcgagtctcattggtgcccttgacaagagcagtctctgtggaatggtagaggcagaaacatgactgaaatggattagaaagagaataggaagagaaaaattgttcggttgactttttagaccactctttaaaagattttgctataaagaagtgagacaggctgggcgcagtgactcatgcctgtaatcgtaacactttgggaggccgaggtgggtggatcacttgaaaccaggtgtttgaaaccagcctgggcaatgtagcagcaccccgtctctacaaaaaatacaaaaattaactgggcatggtggtatgcacctgtagtcccagctacttgggaggctgaggtgggacaatggcttgagcctgggaggtcaaggctgcagtgagccaagatcacgccactgcatcccagcctgaatggcagagtgagacgctgtcaaaaaaaaaaaaaaaaaaaaaaaggaagtgagataatgagtaggtagaatttcggagtaggactaggtttgttttggttttagaatgagagaaacaacagcatgtttgcatgtggctgggaatgatcccacactgggagaattcctggctcagtattcacacataggtatgtggagacagggtctagtgtgtaggaaggaggggatcacctgaaggaggaacatggaaaatccatttgacagggaggaaagaaaatagattaacgcagaggctgagggtggggctaagagttgatacaaatttcttctgattccttcagttttcttagccaactaggaagcaagatcatctgctcagagtgaagataggtgaggaggtgttggaagtctggggagaagaggagaagatgcaaagtagactgtgagttgagcagagactgagtatactggggaagcatcggatgatacggagcggctttaagggctcactagagggttgagttcacgtatgattggcagttgactatggagcttaagcttagtaaagcagtacaggacaccaaggagaagggcagactttgaaagcatgaatgggtcccaatggtgttgaaggagcattggaactgggttacagaaggagtgagctttgacaacgagcgctggtctgaaaggggttgcaaggacttgggctggtggagaggctgtggtttagaaaggcctggggtgcagccatgagggtgctgaggccgggggtggacatggagaggggacacagatagagcataaaatcagtgggggaagggaaagtcaaggaactgaagggcgggatttagaagggtacacgtttgttgaggtcaccaaaaattaagacaagggatgtgttagagaatcagtaaaccaagagccaaaatccttcagaaatcaggcagggggcaagacacaaaatgtgagtcagtttctccattagctttgaagtttccaaatgacttaaggatctttctgatgacgccagcaaactgtagaagtataaaattcaggcatttgataaagaaacaccatgtttttaaatattaatcctccatggatgatcaatccttcagtgacaattaggaattgaaacagtagtctaaataattattttggcttctttgtacctacagatgcaaatacaaaattagaggaaatttctctaaggataatactactagatatccccgaacatcatacatgtggtaatagattgcataagtgtttctcttcccataatttcttcgtggttccataaaaatcatttgaaaacgttgctagacagattatgaggaaacatgtgcaaaagaaaggttagattgttaacgctgaattactttccttggcttgtgtttgttctgacagagatttagctcattgtcatacaagtctcgggaagaagaccccactctcacagaagaagaggtaagttttgtttctttttaaaaagggaaaactgtagtaaagaatagaccttccccccttgaataaatgcactgtaatgttaccctttgaaagagctgaaatattctcctatgcctatgtttggagatgaagacttgggatgctggttttataatggcttggagagactgacgggcaggccagacaagaaggatggcaggacaagtagtcagctcaggaaaagaaactgagcaggaaagcagggtcaggaaaaatagagagggcaggggagaagagtgagaagagaaaaattccagcgtgggagcagtcagcagtcaggaagaccacatcagaaggaaatgaatcatgggttggaaaattcaggaaattagaacaggtgagtgtagggaatttgctccagcctgggagacagaaagaggaagtctccgtggggaaatttggatgctgagagcagattaacttcagtaagtacagttccaggcaggagctagggtcagacatagcagccaacaagagcagatcgcatattcccaagcaccagggtgcaaaattcacgagttagattttcaatgaagcattaaaattgttaaagccagtattatacatataatatgaaatatgtgtatatatacatatttcatatgtatatatataaatgttgagctatgctcagagagctaaacaccttaattgatctagctgtatatagcttctatctggaattcctagcagagtaaattgtgtacatgtacaagagcaaagtacatatgcaggtacatcacttcctataggactctgagtaaagcattagaatatggacatagacacccacgttgaatgttcaaagagcaaaaatgctttccctaggtgatattgcccaccctcgtccatgtttctacctccagaatggacctgccatctgtctatctggttgcacagaccaaaacctaggggtcatctcgatacttccttttcctcactgtcctccaacacagtcaattgccaagacccatcagttgcacctccaaactgttttctttgtgtacccacctccctcaagcccactgcggccgcccctccctaggccagagcagtcccctcctgctgatccctggcagctccttggcctccctccactctgttttctactctgcagccaaagtgatcccatctgggacaagaaggtaaaatatataggagttctgggaattaaagactatgtaaaattttaaattgctccttatcttacatttgtttgtattttttgaaacaggacctagttatactgatgaatttttaacatgacagaactatgactcacagacattcattttaggacaaagaggaaaaataaatatgaaagttttttttgtatttatgtaatttaatgttaaacagtccagactgaagctgagatctgagctttaagttctattaccccaatttaacagaatgttatggaaaggattgattagaaaaagaagagaaatggggaaaaggaagagagtaacttatgggaatatagcaacaatttacagactgaggaataatgatgaaagttttaaagagaaaaattgagaagctaaatagcaagggggctggaagagaaacctgtatacaaaataaaaataatagtcataatggtcatagaaaacagtcaaaaggaatatgagaagactcaagaagcttttataaaagttgaaatgtacagtgagaccctctgcacactaggttcattcccagagtcaatattaaattgcaagttaatgaatgaggacaaaggccaagaagaccaagtactcttacaaagagtgaggggcattaattacaaagaccagggggaagaaagctgaggagagaagctaacggtggtgaggggctgactctcattgttacaatctaggtcaaggtacatttgtcctccttgatgttaccaggtgatgaatacgctggtatgccgtctcccctcaccattgtcatccattgtttacctttttataatctgtccacatataatttttggcttggaccaccatttagataatacattctgtgtttgcacttccttataaacagcagtgaattttttttattaaattcaaagaaattataattcttgtattctgagagcagttttttcattaaaacctctaaggtgagaatgttaatcatttcatattcattaggatagtcagatcaacatagtaagagttttccaaagactgtttttctgaactgtaaacccttggattgtcaaggcctcaccaaactgagccagccaccagcctgtaatgaaaagttctcatgcaaatgaccagttagcatgtggcaggcctgtcttaagaagcttttgagacataagaaggcctgtcttaagacaggcctgtcttaagaagctggaaacttcacctgcagtatgtgagaaaagtggaagcaggaaaatgtccctcagcccttgggaagccaggcatctgtgaggaagcatgttcatgtatttcctgggtatttgaatgaatcaaatcactgtgataaaaataaacacaggtaatgaagggtatttttacttatttccaaccgtgatttttcacaataaaataatactccccaaaagtctcctaattagtatatttaatcttcacaatgaatgaaatccctgttgatatcggaggtgatacaggatttattagtgagactgtgggggtgtgcttggaaagccactggctcttaatagtatcctgtaagttgtcatttctgacttggctggttgcaagcgagaatgagttttcccactgaagaaaactagacctggactgtcaatgtctgtttaaccagtaatacgcaactaagtcaagaaataatggacaggaataccctttcagatatatgtgtaccaccaacgagaatccagcaacgggtgttggagaccactgtgatgcaggaagcatggagtagtctaattcagagttcttatactttactggccatcagaatcagcaccggttgctgggccccagccccgaggttctgatttggtggttctgggatgaggcctgagaacttgcctttctgacaaattcccagatcctgttgctgctggtttacagcccacactttgagaatcaccggtctactatgtgttttctgtccttttttgtaaagcagtggagccccttttcaggcaaaatatcattctgataaagaaatgaaataaaacacatgctgtggtcaggtccccggggccttcaggagcttcccactccacctctcctcaaattcctcggcagacccaagagaactgggttttcacggaattaagggaatatgactgatctagttaacatagttgaagatagtgtgtgtaattattctctagtaatgtgctccataattagtacagataagaaagaacaaatctttaaggagtacacacacagaaacccaggagtgctcagtatgtagcttgtcactaaaaagagggagggggaagtcacagctggaagtttattcaactctccctttgtctcctagatctcagctatgtactcatcagtaaataaacctggacagttagtgaataaatcggggcagtcgcttacagttccggagtccacctacacctccattcaaggggacccacagaggtcaccctcctcctgtaatgatctctatgctactgttaaagacttcgaaaaaactccaaacagcacacttccaccagcagggaggcccagcgaggagccagagcctgattatgaagcgatacagactctcaacagagaggaagaaaaggccaccctggggaccaatggccaccacggtctcgtcccaaaggagaacgactacgagagcataagtgacttgcagcaaggcagagatattaccaggctctagcaacccagaagacaaccctgggtagcctgtgatcagtgtctggagacgtttcttctgtggaagagaagaagtgacacaaacctatacttcatatgctgctttagtcacctgaagatggttggagaggccctgtcgactgttctcccagttgttcagtttctgagacagagaggtacggactaggctgcacctgagtgtgcccctgcctgccagatggacaggtacacccaagcacatctccctgctgcaccctcaccacccacaaaagatcccagctgtcagtggtctcatctcattagtgaggaaagccaagctgtatggaaaagctgcactcaccaaggaccacaatgcccccggcctaaagtactgccattcagaaaagcaggtttttcttcctctctttccttttctctgtctgctactgactttaaggctttttcccccttgaaatgtccagattcctgtggttcatcccaaggaaattttcacacaaagcttggcctttgccctcaatataggtgttttaggatggtgacaaaccatggctgctgctttctgcccagctcgccagtcctccccaaagagttgcgcatcagcacctggggatctggaccctgcgggtgaagggatggggagggacgtccctggagtctcttctgtctttgttccttcttattttggcattcgatatcagcagcctctccccaaagtacttgaagtcagttttagatgctttattttatttttctagtcaaaaacgtgtttcccccagtgtttgaaaactcgtccgaatcttttcagtattttccatgagtattgtggtacttctagacttgtttaagcccagaactcattccttcaaaacagagagccttaatctttatgttgggacacagaccacatatttggacggcagccatgcatccatcgctgaagggctgtggacatgaatgtgtatttcccatggtctccgctgcccacaccaacagtgtggcatctcataagttaactgctaccctaaggtaatctaagattaaaatgtaaacatttatttttgttatgtaagtttataagatgttttatgttcaatgcctaatttctcaaaagtgccagaaaaaaatgtatattagctattttgattttatgtacaatgatttatactctccttttgaaaagataccataaagcacataagctagatcactacaaggagctgttatcttttttctaatcaagtgtttaaaacactgatggtttttaaagactcacctttttaaatggtacttggagctcctgattcaaattacctagaccccctagagaaataaatggaatatacataaataatcattttcagtggtttatggtgggcaatattgcaatatttgaaatggtaaaaatggaaagaagaacaaaatatgatgagaggtggctgtgaattataaacctcataaaagtgtcataattccattaaggtttaattatattttttcagaaaacagtgatgaattctgtagtccagtgcttgccaatgcaaattgcctattggaatcttcttcctatattttacaaacatcagtggctgaaatagctcagagtaagagctcagcctggtttgaatttaatcatctctttagatcttataaggccagcattaggaaacttgttcacttttcattttcaaaggagcctagttgaagtgctattatgagtgtgggctatggaaagacagcttttcctacactgataaagaaaaaaaatgaggaaattatttcatccccttgtgacatctgtgactttttggatttaataatcttgctgtttttcctctttatgacaaagaatataattgggaggatgaagtgtcttaaaaattgtagagaccagctcactggaatgtttttccatccctgtattcatggcttgactttgtgactgctctacactgcatgtctgacattgcagagtgagctatgttgaggtaaactggttggttgtcattattttgcaatcagcctggtctctcccatgaagatgtcgtgtgcataagcacaatcatcactgattagaagatcacagcagaatacccttggattagagagaagttcgtaccttgcatttctctgaattctagtctctcataagcactgctttgctggatgattttcactgctttgtgttaatgactttgagcgatctctcacatgatggggttctttagtacatggtaacagccatgtcatcttacacacctagcattgtgaatgctgtagtgacatcctttataggcaccttacagctcaaaacttttgtttcatttcatgccttacttatcaaaaaggcaggaaagtaggtatgatctctaaagtaaaaaaaaaaaaaaaaa

SEQ ID NO: 819 - DNA, 508 bp, Homo sapiens
gggtagggagatgagagatggcagtggattagggagattagagatggcagtgggttagggagatgagagatgacagtggggggcaggggcaggtgatgagttgcatttttgcaaaagctatataagaattgttatatactgttctgattttttttaatgaacctaaatgagcatggatttatttgctatggagtacttgaaatctttatttgaagacattaagaatccatccaggccaggtgcagtggcacactgtaatcccagcactttgggaggctgaggcaggaggattacttgagcccaggagtccaagaccagtgtaggcaatatggtgagacttcgtctctacaaaaaataaaaatattagccaggaatggtggcgcatgcctgtagtcccagcagtggggggcaggggggtggttcaggagaggattgcttgagcccagggaggtcaaggctgcagtgatccatgattgcgcccctgtactctgggcaacagagcaagacc

SEQ ID NO: 820 - DNA, 457 bp, Homo sapiens
tgagatggagtctcgctctgtcgcccaggctggagtacagtggtgcaatctcagctcactgcaacctccgcttcccgggttcaagcgattctcctgcctcagcctcccgagtagctgggactacaggcgtgtaccaccacgcccggctaattttttgtatttttagtagagatggggtttcaccatgttggccaggctggtctcgacctcctgacctcaagtgatccacctgcctcggccttccaaagtgctgtgattacaggcatgagcgaccatgtttggcctattatttatattttaccactcagaatataagacagagattggcagaatggattttaaaatgatccaactactcttgaacagacatttatccaaagaagaaagacaaatggcaaataagcaaataaaaatatgttcaacatcactaataattagggaaatgcaaatcagaacc

SEQ ID NO: 821 - DNA, 2185 bp, Homo sapiens
ccaggctggagtgcagtggcacgatcttagcttactgcaagctccgcctcctgggttcacgccattctcctgcctcagcctcccaagtagctgggcctacaggtgcccgccaacacgcccggctaattttttgtatttttagtagagacggggtttctatatatatattatatattatataatctattatatatctattatatattatataatctattatatatctattatatattatataatctattatatatctattatatattatataatctattatatatattatatataatatagatatatataattatatatataattacatatatatatagccatctcaaaaaaaaggttaaaatggtaaattttatattttatatatatacacatatatacatgtatacatatatgtgtgtgtgtgtgtgtgtgtgtgtgtgtgtgtatatatatatatattttttttttttttgagacagagtcttactctgtcatccaggctggagtacagtgacatgatctcagctcactgcaacctctgcctcctgggttcaagcaattctcgtgcctcagcctcctgagtagctgggattacaggcacgcaccaccacgcctggctaatttttgtatttttagtagagatggggtttctccatgttggccagcctggtcgcaaactcctgaccttaagtgatgcacccacttcggccttccaaagtgctgtgattacaggcatgagcgaccatgtttggcctattatttatattttaccactcagaatataagacagagattggcagaatggattttaaaatgatccaactactcttgaacagacatttatccaaagaagaaagacaaatggcaaataagcaaataaaaatatgttcaacatcactaataattagggaaatgcaaatcagaaccacaatgggtcaggcatgttagttcatgcctgtaattccagtattttgggaagctgagatgggaggattgcttgagcccaggagttcaagatcagcctgggcaacgttgtgagacgcccatctctaccagaaaaaaaaaaaaaaaaaatcagaaccacaatgagataccacttcatacccgttaggatggatattttctaaataatacattttttaaataatatattttaaaaaaacagaaaaagtgttcatgagcatgtgaagaaattacaacccttgtaccctgctggtgggaatgtaaagagatgcagccactaaggaaaacagtatggaagttcctcaaaaaattaaaaataagccaggcgttatggtatgtgcctgtagtcccagctacttgggaggctgacgtaggagaattgcttgagctcaggagtttgaaaccagcctggacaacatgggaagaccccgtctttaaaaaaaaaaaaaaatagaattaccatatgactcagcaattacacttttttggatattgtattagttcattttcatgctgctgataaagccatacccaagactgggaagaaaaagagatttaattggacttacagttccacatgcctggggaggcctcagcatcacggtaggaggcaaaaggcacttcttacatggtggcggcaagagaaaaatgggaagaagcaaaagaggaaacccctgataaacccatcagatcatgtgagacttattcactatcatgagaatagcacggcaaagaccagcccccatgattcaattatctcccctgggatcctcccacaacacatgggaattctgggagatacaattcaagttgatatttgggtggggacacagccacaccatatcattctgcccctggcccctccaaatctcatgtcctcacatttcaaaaccaatcatggctttccaacagtgcctgaaagtctttttttgtttttttgtgtttttttgagacggagtcttgctctgtcacacaggctggagtgcagtggcacgatctcagctcactgcaagcttcgcctcccaggttcacgccattctcctgcctcagcctctggggtagctgggactagaggcgcccgccactacgctcagctaattttttgtatttttttgtttttattagagacggggttttaccgtgtaagccaggatggtcttgatctcctgacctcgtgatccgcccgcctcggcctcccaaagtgctgggattacaggtgtga

SEQ ID NO: 822 - DNA, 275 bp, Homo sapiens
ccatgttggccagcctggtcgcaaactcctgaccttaagtgatgcacccacttcggccttccaaagtgctgtgattacaggcatgagcgaccatgtttggcctattatttatattttaccactcagaatataagacagagattggcagaatggattttaaaatgatccaactactcttgaacagacatttatccaaagaagaaagacaaatggcaaataagcaaataaaaatatgttcaacatcactaataattagggaaatgcaaatcagaacc

SEQ ID NO: 823 - DNA, 626 bp, Homo sapiens
cattctggggtctggaggatggtggccctcttctcacagcttcactaggcagagccccaggaaggactctgtgtgggggcgccgaccccacatttcccttccacactgccttagcagaggttctccatgagggccccgcccctgcagcaaacgaatcagatcttgtgagacttattcactatcgcgagaatagcatgggcaagaccggccccatgattcaattacctctctctgggcctctcccacatcacgtgggaattctggacgatacaattcaagttgagatttgggtgggaacacagccaaaccgtatctgatattatcccaaagaagtgaaagcagggatttgaacagatatttgtacacccatgttcacagcattcacaacagccaaaaggtggaagcaacccaagtgctcatcaacaattgaatgaataaacaaactgtggtatatacatacaatggaatattttattcagccttcaaaaagaatgaaattctcacacatgctacaacagaaatgaacctggaagacagtatgctaaatgaaataagccaatcaaaaaaagaacaaaaactgtatgattccactcatatgaggtacctagaataaccaaattcataga

SEQ ID NO: 824 - DNA, 115 bp, Homo sapiens
tttttttgtttttattagagacggggttttaccgtgtaagccaggatggtcttgatctcctgacctcgtgatccgcccgcctcggcctcccaaagtgctgggattacaggtgtga

SEQ ID NO: 825 - DNA, 219 bp, Homo sapiens
tgccactgcccttcagccttggcaacagagcaagactccatctccaaacaaacaaaccaaaaaacaaaacaaaacaaaacaaaaacaaggccgggcatggtggctcatgcctgtaatcccagcactttgggaggcagaggcgggaggatcatgaggtcaggagatcaagaccatcctggctaacacggtgaaaccccgtctttactaaaaatacaaaaa

SEQ ID NO: 826 - DNA, 1487 bp, Homo sapiens
cactattttaaggctttatttacatatatttttacacaaacgtaggggaaaaggttctccattttgcaccaaatatatatgagggtgcaagaaggggagcggacttgagctgcgtctcccagtgcgtgctgaggatgctaatacaggtatttagctggtaatcccggagcagcgaccccggtcaccctttcctgggacgaatctgcagcgctcacaggggcccagggctgacatccctcctcggggactggggttggacactgtcgccgctttgctaaagccagaacatttcaggccgagggctccagctgcagacacggcctagtacacttctccaccggagggtctgtagtctctgggtgaggccctttgacgctcctagaagtagctgacgggcagacaggtgaatacagtaggctcgaaaacagaatcatacagccagcctctggtgttaggggcgtgtttttgtgtgtgtgcacacgcagtaattcccggatggcccggacatccttgaaagattccaggtgcggggacatgagctctcaaggcccagaagaaaaaagaaactaccaggcttgggatctacttagttgctgagtttgccactatagctcaaaggaggaatttaaaaatggagatgcacctctttcccccatggggtcgggcagtgagagcagaagaccaaatgcaccctctgcgaacccaggaggctggtctacgtgtcaggccaaccccactctcctgtcatactgtctttaaatattttggccgggcgcggtgactcacgcctgtaatcccagcactttgggaggccgaggcgggcaaatcacgaggtcaggagatggagaccatcctggctaacatggtgaaaccctgtctctactgggcctgaagtcccagctactcgggaggctgaggcaggaggatcgcttgaacccgggaagcagaggttgtagcgagccgagattgtgccactgcattccagcctgggtgacagagggagactccgtctcaaaaaaataaaaaaactaaacattttaagttaattgatatttaatattaaatatttaatatattaagtgaatacattcaaatctgcaaacaatacagctaggttgtagaagagttaaaaaaatccctccactcagtttttgccaaaacaccacctgtaagcactgagaagcctactgatgcacgcattatcctttgggccaatagaaacaaacgttttaataaaatgctttcccagtggtcaaattgtcttcctgagtaaagctaaacttgctgtagtgagaacaggtagtgtttatttctagcttcttctgggtcccaggttacctaagacccaagggtaatgacaatgggcagctccactttattaaaagccaacatttagcccagacattttattctccaaaaatcagcaagcatagctttacattcaagttgggtataatgactttattttcccagtaattccctaaata

SEQ ID NO: 827 - DNA, 5698 bp, Homo sapiens
agtgatatgtcataatcccttctgtgggctgggcccacataaggagagtcaaatcacttgggtgctgggaagaggcacatgtcacacgtgcaagaaggtccaaggatgagattaaaaattccacaaaggtccaaattctaggtatgagagtcaatgcttcctgtatgttgcttctatatacatgagccacaatctctacaatggactgaatccactcatgagagcctcaattttttctgtgtactgtgttcccttattagaatcacagtctcacaggtgtgctagattttgatctgagagacagcagtcaacctgtggaccagatccactcatgagagtcaattttccaacttttgactgtctccaggtatgagattcagaagctcaacagtgggctgtgaaaggatgatcatctttactctttgctgtgtgtgtgtaagagtgtcacaatcttacctttgttcagggccatgttaagacatgttctgttatcacccaagggctttatatggtatgcatgggagtcacaacttcctctaaatcctttgtgctgttatggactcatgatagtgtctgtagctttaagcccaggtatgacagtcgacatctttctgattggctgggtccagataggagagtcctcacctgccagagctgggtttagaaatgagtcaccatcacaactctggacagaaattcacaaatgaatgtcacaattttaactgtggactgcatccatgtgtgagattaagtacctcaccagtgggcttcatccatgtgtgagggtgacaatcctaatggttgtcaggatgagcacacaagaaacacaatctcatctgcacgctgggccttgtgatgacactctctctaccacccaagggctttatacaatatgcgagagagtggtaaccttttataacctccatacagaaaggaaacccaggatcttacccatttttctacacctagctatgacagacagtatttgtcctcttagccagttcaaaatattagagtcattattgcacctgtgcactgagccaatatatatgtcaaaatcctacctgtgtgtagggagcaaacagaagagtcacatcacctaagttctgggccagagatatgtgacaaacttttctgaaagaagggaccagaaaaaagagacacatcacctgggttctcagccagggatatgttacaattccacactaaaagcagggcacagacaacagcagcacatcaccctgattcagggctcaatgatatgtcacactgttacctttgggtaatacccaggcatgaaagacacatcacctggttcgtgggttccaccatatgtagcaatcttttctataagcagcatgaacgcagaggaagagagtcacatctattaggtgatgggtgcaaagatatgtcacaaggcctctggtggtcatcgcccaggcaggagtctctcatacagtataagttgggaccagcattaggtcatgatattcaacatatgcagggcccagggaaatgagaagagttacattacctaggtgctcaatccattgatatgttacaataacctttttttttttttttttggcagggcccagacagaagagaagagtcacatcatctagatgatgaatgaaaagatatgtcattattctcctttgggcagtgcttctgcagaaaagttgcaccttctaggtgttggactcagcaatatatcacaatgtctgcagtattttggaaggagaggagagtcaccattacttaggtgctaggcccagcaatacatctcaagcacttcttgggcaaagcccaagcagtaaaaaagagtcacattacctaggttctgggtatagcaatatgtcacaaatgcccctaagaagagggcccaggaaaagagagtcaccttggtgagaatgtcagagatattccatttttgggtattcacaaaaaagaataaagtcccataacctagaaggtgggctctgctccatgacacaaatcaccctagtgggcaggtccattaaagagaaggctgtcaaagcacatagatgctgggcaaagtgatatgtcataatccccatgatgataggcccagagacatgtcacaatgacctctttaggcagagaccaggcagaagaatcacatcacttgtgtgctggccctagtgataagtcactctcatttctgtggacatggcccaggcagaagagcagagtcacattacctaagcgctgggtcaagagatatgtcacaatcttttacatgggcaaaacccaggtaaaaaagaggagtaatatcagatagtaggtgttgccagagatatgtcaaaatgccccctgtatgaaagactcaggcagtcaaaacacattagttggtttcttaacctagtgatatgttataatctttcctgtgggtatgatgcaggcagaagacgagagtcatgtgatggatgcagagacatgtcacaaggtcttctgtgggcagggtccagactgaagccttccacctgctaggggttgagcccaatgatatgtcacaatacccaaattatgcagggcccaggcaaaaaaaacgagaggcacatcacctgggttctggatccaatgatatatcacaattttctattttggcaagacccaggcagaaagaaaagttacatcacctaggtgatgaatgaaaatacatattataatagttttgtgggcaggacccatgcgggagagtcacatcacctaggtgttggacccagaaatatgtcacaatatacagtgtatacagagctgaggcatgagacaatagtaacttcactcatttgttgagcccagctatacaatccttttttgggcacagccgaagtagtagaggagagttacatcaccttggtgctgggtccagcaatgtgtcaccatacctgctgaggggagggtacaggcaagagagccacatcacttaggtgaggggcccagagatatctcacagtaccccctgtgggtagaactcaggaaaaaggagagagtcacataatctagaagctgagctcagctgtatgttacaatcacccagtggacaggtcccaggcatgagagtagagtcacatcacataggtgctggaccaagcaatttgtcacaaccttcactgtggacaggtccccagaaaaagagaatcacatcatttaggtaacaaaacctgagttagtcactgttacttgtttgggcagaggtcaggaagaagtgtcacacaacatgtatgctggactaagcaatacgtcactctctctgttttaggtatggcccaggcaggagagaagggtcatatcacctaagctctggattcgcagataggccccaatctcttttttgggcaatgctcgggtaagagagcagagtcacatcaagtggttgatgggcccagagatatatcacattgccccttgtggacagggaccaggcaggggactcacatcacaatagaggtaggacaaggaatacatcacaatacgttttgagagcagaaccaaaaaagagtaacataatctttgtgttgagtgcagcaatatgttacacttttctttgtgggcagaacgtgtaaagaaggaaaaagttggccggacacggtggcctgtaatcccaacactttgggaggtcaaggtgggcagatcacctgaggtcaggagttcaagaccagcctggccaacatggcaaaacgctgtctctactaaaaatacaaaaattggctgggtgtggtggcaggcacctgtaattctagctactcaggaggctgaggcaggagagtcacctgaacctttgaggcagaggctgcagtaagcaaagatcacgccactgcactccagtgtgggtgacacagcaagactccatctcaaaagaaaaaaaaataaagaaaggaaaagtcacataagctaggcacttggcccgtgatatgtcatagtcacccatttgagaagggaacagcgaagagaagagagtcacatcacctctctggtggacacagagatatctcacaatgctctctgtaggcagggccagggcacaagagttatataactcgggtgttagaccaagcaacatgtcacaatggctgatatgggccagacacagacaagggagtcacatatttgggtgtagggctcagttatatgttgaaatgccccctgtgggcagcgacaaagcagaagattcacatcacctggatataaggcccggtgatacgttacaattcccctgtgagcagcgctaaagcagaagaatagggtaatatcacctaggggctgagtccagtgatatgtcacaattccatctgggctgggcccaggcagatgtgtcaaatcatgaaggttctgtgaaggtgcatatatcacaatcacacctgcaggaaggtccaataatgagattaacaatctcacacaggtccgggttctaggtatgagagtcaacacctgtgtgttggatccaaatagatgagtcgtagtctcaacaattgacttgatccatgtgtgagatcctagtttctatttgcattactattggtaccagtacctattaattcttccaccttctacatctttgttctgtatgaatgtatatacaaagattgatacatatacaagattatatgagtatttctatgtaaatatgtacacaaaaattgttcctccaaagacatttttcagtatcttagcatattctaagggtgcagatgtagaattatttctcttctctggctcagtagcatgtcagaatggaacataggtatagaatgttttttgtatagacaaagcttcactttcaggggcaaggtttgggaaataagctgatagtaaagtcatgtaacactttctgtgcaggttaacatttctggaccttgctttccttctcagtgtatgcatgagctattctcatgcaccactgggggccagtcttgattaatctacagttgaaatttagagaactggctgattgaatccacctgggctgagctaactgacattgaaatcagctgggctgagcttattggccagttaaaatcatctgggctcaaatatcggctgactggagtcacctgggctaaactaattggctgattttaatctcctgggattggttaattgactgtaatgacctgatttgagttaattgactgattgaaatcaaaagtgctgacctaattggctgattgaaatcacctagaatgaggtaactgactgattggatttacctgatctgagctaattggctgatcagaattacctagaccaaattaattggctaattggaatacactgggctgagctaattggctgattgaaataatcagggctgagtaagtgggttgcttgtattcacctcccctgagaagaataagtagggaaatgatctctgacttacctttttttttataagacatactcataaatggacattacatagatatatttatatattgtatgtgtttgtatgtgtttatctacatatattatatctgttaaccttcaagttaaagtgtgcaaaggaatctgaaatttgctttcaatattgcagtctatcttcaatttacagaccttggcttttctaccccaattcaagaagtcacttcttcagtcaaccaaaccaattacaaaattgtgttccaatgtcacatgttcaaaaataaacagttcctgaaaagatgtaagctttaaa

SEQ ID NO: 828 - DNA, 5703 bp, Homo sapiens
agtgatatgtcataatcccttctgtgggctgggcccacataaggagagtcaaatcacttgggtgctgggaagaggcacatgtcacacgtgcaagaaggtccaaggatgagattaaaaattccacaaaggtccaaattctaggtatgagagtcaatgcttcctgtatgttgcttctatatacatgagccacaatctctacaatggactgaatccactcatgagagcctcaattttttctgtgtactgtgttcccttattagaatcacagtctcacaggtgtgctagattttgatctgagagacagcagtcaacctgtggaccagatccactcatgagagtcaattttccaacttttgactgtctccaggtatgagattcagaagctcaacagtgggctgtgaaaggatgatcatctttactctttgctgtgtgtgtgtaagagtgtcacaatcttacctttgttcagggccatgttaagacatgttctgtatcacccaagggctttatatggtatgcatgggagtcacaacttcctctaaatcctttgtgctgttatggactcatgatagtgtctgtagctttaagcccaggtatgacagtcgacatctttctgattggctgggtccagataggcgagtcctcacctgccagagctgggtttagaaatgagtcaccatcacaactctggacagaaattcacaaatgaatgtcacaattttaactgtggactgcatccatgtgtgagattaagtacctcaccagtgggcttcatccatgtgtgagggtgacaatcctaatggttgtcaggatgagcacacaagaaacacaatctcatctgcacgctgggccttgtgatgacactctctctaccacccaagggctttatacaatatgcgagagagtggtaaccttttataacctccatacagaaaggaaacccaggatcttacccatttttctacacctagctatgacagacagtatttgtcctcttagccagttcaaaatattagagtcattattgcacctgtgcactgagccaatatatatgtcaaaatcctacctgtgtgtagggagcaaacagaagagtcacatcacctaagttctgggccagagatatgtgacaaacttttctgaaagaagggaccagaaaaaagagacacatcacctgggttctcagccagggatatgttacaattccacactaaaagcagggcacagacaacagcagcacatcaccctgattcagggctcaatgatatgtcacactgttacctttgggtaatacccaggcatgaaagacacatcacctggttcgtgggttccaccatatgtagcaatcttttctataagcagcatgaacgcagaggaagagagtcacatctattaggtgatgggtgcaaagatatgtcacaaggcctctggtggtcatcgcccaggcaggagtctctcatacagtataagttgggaccagcattaggtcatgatattcaacatatgcagggcccagggaaatgagaagagttacattacctaggtgctcaatccattgatatgttacaataacctttttttttttttttttggcagggcccagacagaagagaagagtcacatcatctagatgatgaatgaaaagatatgtcattattctcctttgggcagtgcttctgcagaaaagttgcaccttctaggtgttggactcagcaatatatcacaatgtctgcagtattttggaaggagaggagagtcaccattacttaggtgctaggcccagcaatacatctcaagcacttcttgggcaaagcccaggcagtaaaaaagagtcacattacctaggttctgggtatagcaatatgtcacaaatgcccctaagaagagggcccaggaaaagagagtcaccttggtgagaatgtcagagatattccatttttgggtattcacaaaaaagaataaagtcccataacctagaaggtgggctctgctccatgacacaaatcaccctagtgggcaggtccattaaagagaaggctgtcaaagcacatagatgctgggcaaagtgatatgtcataatccccatgatgataggcccagagacatgtcacaatgacctctttaggcagagaccaggcagaagaatcacatcacttgtgtgctggccctagtgataagtcactctcatttctgtggacatggcccaggcagaagagcagagtcacattacctaagcgctgggtcaagagatatgtcacaatcttttacatgggcaaaacccaggtaaaaaagaggagtaatatcagatagtaggtgttgccagagatatgtcaaaatgccccctgtatgaaagactcaggcagtcaaaacacattagttggtttcttaacctagtgatatgttataatctttcctgtgggcatgatgcaggcagaagacgagagtcatgtgatggatgcagagacatgtcacaaggtcttctgtgggcagggtccagactgaagccttccacctgctaggggttgagcccaatgatatgtcacaatacccaaattatgcagggcccaggcaaaaaaaacgagaggcacatcacctgggttctggatccaatgatatatcacaattttctattttggcaagacccaggcagaaagaaaagttacatcacctaggtgatgaatgaaaatacatattataatagttttgtgggcaggacccatgcgggagagtcacatcacctaggtgttggacccagaaatatgtcacaatatacagtgtatacagagctgaggcatgagacaatagtaacttcactcatttgttgagcccagctatacaatccttttttgggcacagccgaagtagtagaggagagttacatcaccttggtgctgggtccagcaatgtgtcaccatacctgctgaggggagggtacaggcaagagagccacatcacttaggtgaggggcccagagatatctcacagtaccccctgtgggtacaactcaggaaaaaggagagagtcacataatctaggagctgagctcagctgtatgttacaatcacccagtggacaggtcccaggcatgagagtagagtcacatcacataggtgctggaccaagcaatttgtcacaaccttcactgtggacaggtccccagaaaaagagaatcacatcatttaggtaacaaaacctgagttagtcactgttacttgtttgggcagaggtcaggaagaagtatcacacaacctgtgtgctggactaagcaatacgtcactctctctgttttaggcatggcccaggcaggagagaagggtcatatcacctaagctctggattcgcagataggccccaatctcttttttgggcaatgctcgggtaagagagcagagtcacatcaagtggttgatgggcccagagatatatcacattgccccttgtggacagggaccaggcaggggactcacatcacaatagaggtaggacaaggaatacatcacaatacgttttgagagcagaaccaaaaaagagtaacataatctttgtgttgagtgcagcaatatgttacacttttctttgtgggcagaacgtgtaaagaaggaaaaagttggccggacatggtggcctgtaatcccaacactttgggaggtcaaggtgggcagatcacctgaggtcaggagttcaagaccagcctggccaacatggcaaaacgctgtctctactaaaaatacaaaaattggctgggtgtggtggcaggcacctgtaattctagctactcaggaggctgaggcaggagagtcacctgaacctttgaggcagaggctgcagtaagcaaagatcacgccactgcactccagtgtgggtgacacagcaagactccatctcaaaagaaaaaaaaataaagaaaggaaaagtcacataagctaggcacttggcccagtgatatgtcatagtcacccatttgagaagggaacagcgaagagaagagagtcacatcacctctctggtggacacagagatatctcacaatgctctctgtaggcagggccagggcacaagagttatataactcgggtgttagaccaagcaacatgtcacaatggctgatatgggccagacacagacaagggagtcacatatttgggtgtagggctcagttatatgttgaaatgccccctgtgggcagcgacaaagcaggagagaagattcacatcacctggatataaggcccggtgatacgttacaattcccctgtgagcagcgctaaagcagaagaatagggtaatatcacctaggggctgagtccagtgatatgtcacaattccatctgggctgggcccaggcagatgtgtcaaatcatgaaggttctgtgaaggtgcatatatcacaatcacacctgcaggaaggtccaataatgagattaacaatctcacacaggtccgggttctaggtatgagagtcaacacctgtgtgttggatccaactagatgagtcgtagtctcaacaattgacttgatccatgtgtgagatcctagtttctatttgcattactattggtaccagtacctattaattcttccaccttctacatctttgttctgtatgaatatatatacaaagattgatacatatacaagattatatgagtatttctatgtaaatatgtacacaaaaattgttcctccaaagacatttttcagtctcttagcatattctaagggtgcagatgtagaattatttctcttctctggctcagtagcatgtcagaatggaacataggtatagaatgttttttgtatagacaaagcttcactttcaggggcaaggtttgggaaataagctgatagtaaagtcatgtaacactttctgtgcaggttaacatttctggaccttgctttccttctcagtgtatgcatgagctattctcatgcaccactgggggccagtcttgattaatctacagttgaaatttagagaactggctgattgaatccacctgggctgagctaactgacattgaaatcagctgggctgagcttattggccagttaaaatcatctgggctcaaatatcggctgactggactcacctgggctaaactaattggctgattttaatctcctgggattggttaattgactgtaatgacctgatttgagttaattgactgattgaaatcaaaagtgctgacctaattggctgattgaaatcacctagaatgaggtaactgactgattggatttacctgatctgagctaattggctgatcagaattacctagaccaaattaattggctaattggaatacactgggctgagctaattggctgattgaaataatcagggctgagtaagtgggttgcttgtattcacctcccctgagaagaataagtagggaaatgatctctgacttacctttttttttataagacatactcataaatggacattacatagatatatttatatattgtatgtgtttgtatgtgtttatctacatatattatatctgttaaccttcaagttaaagtgtgcaaaggaatctgaaatttgctttcaatattgcagtctatcttcaatttacagaccttggcttttctaccccaattcaagaagtcacttcttcagtcaaccaaaccaattacaaaattgtgttccaatgtcacatgttcaaaaataaacagttcctgaaaagatgtaagctttaaa

SEQ ID NO: 829 - DNA, 3878 bp, Homo sapiens
atttagctccaattccaaatgactaactcttaggccagtcatagccaatgaaatcatctgacggtagcttctgtagcccttaacctaaggagtcattagaggttatagtaaattagtttctctagtggtgcagagagaaatgccatcggggaaattatcactgtctttttggctaaagttttatattgtgaactggatcccacttaacagcttaaaaacacaaaaatgaaagggtagtcctagtttatcttcttaattagaatcattatttggaaataagatttgcaatgtgctgtctatccccaaacactgctgagcttgctggaaaacagaatttaacatgaatgttgtctgaaagctgtaggatcaatggcaaaaaaggggaaatgtttggtagggaattggaccagttctaaggtatcacttttaattataaaataatgtcttcctttttatctgcttttcagacagcctcagtgaactattaaacatttgtgtgcaaagtcctattttgcttatctaaggcattttgacttggaagtattaaacttcaggaacgagctagagaagacaatgagggtatgttagagaaggaaaaataggagctttttgcttatggattttagaggtccacaaatcgaaaggaaaaataaatttcttcatttctaaccctaaaataattttgttaatgagatgctgggaagaagactaccaaaaggcctcaaagctcatgcttctagaatattcagtaattctgaatagtctttgggaagtagcatttcttgggaagtagcatttcccttcttccaaataactgtttgagatcttaaaacagaaaatccagtgttaatgggctctagatcttaaactaggtgagcagcttcttacatacaaccagttccttgttaaggatccagcaggaaaaccagccataaaacatttcaacatgcagtttgggggctcccttgcttattcactgagtttaagctcttgctgcaacatagctctgtaccatctgggatgctagcagtcacagcagttagctcagatatctgagctgtctgccacacaaagcctgaggagatcatcattcttcagtttcattcattacttaatgaatgccaaattaattggcaggaagaagaaacactgtgtgatatactgaacaagcctgtgtgcatgaataaggagccactcaaaaagccaattttgagctttatttctccgttgttaacaaatctcaagaaagcctttgttacagtttagctcatgtcatttggttggttttattttctagccctttaacataggaggaaaattgtcatttcatgtataacttgtaacacagaattgaactgatactagtttccttgccttaaattaattatatgtcatcccaagggtctctgttaattctgctttgccaagcaataatgagatctgggtttggcattagaagtatttcataattttggttttttatttaggtttcctccacatctgtaaagtgattgattaaattagaggaggcgtgtagaataaatcccaatcccattgcaactggcagagctttataaatctttataaattcagttacaacaaaggagaggatcctacaccattagagccatgccatcaggtgtttgcaagtgacagctgtagtgtgttgcctcaaataataccaagttataaataataccaagtaattatcaactcactcccaaatttaataagatatcaaagtccaaaaggttacttaggagtagtcttccgtgggggaagataaatttattaaagagtcatgtactgatctttttcttgggattttttttcctttcccagaaaaaaaaattattttggtgactgatcaattgtaaacaattttcttccttacttacaaatcatccgttcagaaaaataaaagtggacttcctttcctaagcattacaattagcctgggcaagaggtgttatgattgtcttattctttaagccggcttactttttggatttgtgtgaaatgtcttttgaaaagaaagtagatagtatagtattaattaactactttgtatagtcttctgcataatttagagttgaaaataatgtaacattttcctgtgaacagattcctttatgcgtacatactttataaatatacatacatacacatacacatacatttttaaaatgctctttttaaagagattcttatcttgctcccactccaaaagctatgtacagttgagttattagcctcagaggaagagtacaggaaagcgaagatgaggacctccttttcttgtgttggtcttgggaacaaacagtattccgtctttcaaatatggcatatttctaaacagtttgggaaagatgttagaattttttaaaagtcagctcttttataaattggaagtactcagtagtcagaaattaagatcccctctgatagagatagattctcaaaaccaaaattggactgaaaattagattgagaagaaagatacaacttcctccatagccaataaaatctgtctttccaagtctgcttattaatgctgtgaatcgctccttctgtttgtgaaaacatctcctggactggaaatgtggtgctgtaaccagctgagccgaaagttggagaatgttaaatatcttatatgggacttacgataaaatgtattgatgttagtgattgtcaaaataggtttatcatttaaaaaactaggaaattactaagtataaagaagaaaaaccagtattaattaagtgatgagacctgttcattttgttttccctgacttatttccattaccaaacatagtaaaggccagaaaagattaaaaaaaaaattaacacagccattccattgttttttaccacatggagaaaggaccaggctggaagcatatgtccccccacccttatttatattcctttgagcattgccgttttctagacagacaatccgaaaataattgtgttgataggtctgtttaagcctgaactctgggtgtaaaatgttatccagaagctatagggagctgccttgctcaggtcattggaaatttcaaccctaagactcattggaatttctaagtccgttatgcaccattatgggcatatggagcatattcataccatgaggaggagtctttgtttatgatggactttttaatatggccataattaaactcacactcaaaaaggatgagctattgtcaaaagccaaaagaaaaacagacaaaatgaacatgaagcaaggagtccataaaacaagagttctttaccacgtttaagcaaatgtctctcaaaaaaaattgtatttctgtgcacattagctgagattcacacattttgcacctcagtagtatttcagatgagactcaatgtgtggagaaaaccgctaacttgtttggttctactcttaccccctcttctgtggcaatgtggggtcagggccgtatcctaaagtatccacatggtcttaaatggaaatcatgggactctggaaagctggcatgagctggttggagcttttaaacagaagtgctttatgggtatcagatctcttctgacatcaattgtttcaaatcattgttgggctctgtcgtgttctgcaatcttccccattcccctcatgatctctggcttatcttttatccaatctgtatggactttttaggattttttttttcttatagtacaaataattttcagatcccagctttggtaaatgtgttaattctactttgtgaataaataaatgagtgatctgctaaaaatggcaattgtagaattatgttgtatgtaatgtacatatggagaaagaatgtattttgttcattttcttaataaaatgttatatatggatgctacaagata

SEQ ID NO: 830 - DNA, 3878 bp, Homo sapiens; identical to SEQ ID NO: 829

SEQ ID NO: 831 - DNA, 510 bp, Homo sapiens
gggttattttccctgtaaatgaaggcaacattggtttatcactaactgttcagattctgaaggtattaatatgactggaaagaccatctgaggcttgtacagttctggcgtaagtcaaaatcctggttgatgacattccttctttagcaccacgtatgctacatcttcctttgccttttacattcttagagaaaaggaagaggggactggagacttgggctttctggggcatagggcagttggggcagcagaggatgatgccaccatccttactctacagcttcactattgtcttacggggacttttttcctgtgggctttcacccagcaaaagcagcagccgtcaatcatatccttgccagagagattcttaatataggagaaactgtaataaggagaaactacgtagaagtagcctgcctagcactacgttcgtaagttttaatggttggcaaaccccgagaggtggttaggacccttggcgatgtacatagcagcattgtacagctg

SEQ ID NO: 832 - DNA, 4398 bp, Homo sapiens
catagaactaaaaatgaaacctgagattgacccaagcacctatctgagattggtatataatatttctataatgatatattttatagtagatattacaatagcatctgactttgagtcacagaaaccttaaactgaggagacaatagttcagaacctttttaagagccattctaaaagtgaccagcaggagggatctagtagtgaataatatcttaatagcaattttaggagaaaatgactctttcgtccagaagagctctgcagaaccagggctcccgtttatcttgtgctatctctgtagtattttcatttgagagaggaggctgagtttccagagctttgctttcatttatttttatacacattgtctctctatatctgcttgtggatattgttattttgaagagaaatggtttgtggttgtccagtggtatacaactgacaggcatttcattaagcacatagaccagactttgtgaatggttcagatattttttcattaaaaaacaaggtatggcagatggacttttccatgggtcaaattttttgtgtgagagatagaggtacatgtcttctgatgatgtgctgtggaatgcaatgtgggaaacctacatctggctagtgcttacatttgctcaaaaagcatgttgtatgaagctgactgccaccatgctaaagcagattcatattaagaagtgtcggtcgatccagtggctcttaagagtgaatagctttatggaatcaagtatgtccctgagtagcaagattaggcctcaccaaagaagaaattaacctgcactttcaaaaagtaccatgtataggaatgaaacattgaggtcccactttattctgtctttagtacatggttttacttattttggggatggatagaaatatatttttgctagttctaggcttgaatcatgggctccttggctttcctagcatcccaaagcagtcaacagtgatttcttaagcaatttgatctgtacctttacttgtgaaaggtatgctatataattcagcaagtaccaacttgtgtagctgcagaataaccaagtggctatccagtcaagtaaatacagtttgcttacatacttcaacagtttcataaaacgattcccctgagtgacacaagaacataaaatgttaatatcactaatatagcctgttaaatcttttgtggagacaggtgcaaatcagaagattgacaaggaagaacttgagcttgctaaataagacttcctaaatttaaaagctctagttttgcttagtgtgaattctggcactttaaaaagattaagcaagtgaaattctgctgccctccaccatttatttttacagtgctttgtaatttttttcatcagttccttaaatgttatttggaggaaactaagttcttgacctcagtaattttatttttgtttttccctaaatgtttccctactagtctttttggaaaacatgtttgttttaatttcatcttccctcactttatttaggtagaatttttcccccttcatttctgaaattttttgctcaccgccatgtttaaatggggttgaatcatagcgagccatttgctcttgccaaagtgagatagatgtactgaggagataattgaaaagtcagactctgtactgtggggctttaatcggagcactgctggaaatgattgcagagaatgtagtgcttcatatatccatgaccaagattgacatgttgctcacaacatgtcacaatttagtgaggagctacatgtatttccaagaattccagcatagattataatttaaataatcgaatttggtatttaggtacattgtttatatagccaagtgtatatgctttactacctaacaattattctagcctaggtgaatccctaattgaaacacctggctaacactttagacacataaattaagtgggatacagttttctcatttgtattatctccagcttcaacctcatttatcctttttcctagtataatacattgttttcaaccagaaattaaagtagatatccaacattattttcagtgcttgtacttcatgagaaataatctgattttcaagacacctcttaagtgcatttgcattttattttggtaatggcagagacctcatgtggccagtttgattgattgaagaatgtatcactcttattcaagcaaaggaattcagacttaaatgcctacctctgtgctgaagctgacagacagtattaactcttatcaaggccatcttttagacctgattttcatttatatgaaaacagacctgtccatgtctaataagtaaaaactgatagaatacattaaaaagtcactggtttatcatagaaaagtttgatgggtttagagctcagtgatttaagcttgtaaaactgcattcttgggcaaaatatttatattgtatataaatggttggcagcttattccagttgatctcttcacatctgccttaaaagtgctatgtagagatacattaacagagttataataaaacagtgttttaaaatctagcctataaacaaaaactagtttgaggcacccaagcatttagtgagagattgagaatgatgcttaatggatcaaaaaagcaattaggagtatgttcctgattttattctctaaattatactcaatttcatggtaattacatgaagaagttacctgcaattattcttaacactacatggaattcactgggtaattgtgggtcatttatttcctgaaagtcacgtgaaatccttagctggttgaatgttgcacagtatttgagaattacggtttgaagtgatttctgtgggagggaatcattgcaatgtatattctaaataaagtcatctaactattaaaaaaaaaacacccttcctaacccttcttttcttaaaattccacattcatccacaatctcatccctttgtagaaattcttgcctgaattctcaccaagttttgaattcctaaggtagccccgatctaggatgtgaaggctgcccagaaaaagtttatggctggaggagtatcatacagtgtctacatatgatagtacttacagattaggtctttggatgctttaacacaaaagatttttgttatccttattagtcaaataacgctattcttttgtggttctagaccctggcttctatctccctgtgatttgttttaatgctgaaatgacttggctatccaaagcttctagtctagaggtctgttggttgaaggcagacatttccaagtttgttgaaataatacgaagctgactagcttacgtgaatgatgttgccctcatttgttttgggtgaggactcattactgcagtatattgatctcttcaccaaatgctttttctttttctgaataaatgctgtattagaggttctatttatatatgatttttaaaactttggtttccttctatccaccaaatactgtgaattgtttttccatttatttttcttagctaatgtaactttattcttcacttttttttagccctagacttcctagattttctgtggcattctgtaggacattgtattgcttggaaaaaaaaagatcaaaatcattctggggcaaatgctctattatccttatttatgacaagagaataatgaaattcataagaaattaataacattcagatattgctataaatgtacttgagtcattttcatttggggatagtaataatggctgtggcagctttaatggagaaacctgtgttggcctctttttctggcattaggatctcttgtcatagaactattggtaaagtacaggtttgatagcagagttcctgaattcagcatatcatcagaatttccatttaccttttgtcttttctttttattgtattttttaacctttttgtttctattcctacctcccatgagtaacattgatttctgctgaagttagaatttgtgttaagaattgactttaaacttctgaaatagttgaatattagaagtggcttcagttgccatgaaatgattgcttttctttttctttttttttccttaaataaaaataatgcagccttatatatgtctcttcccctcaagaatgtgaatttaggctgggcatagtgactcacgcctgtaatcccagacctttgggaggctgacacgggaagattgcttgagcccaggaatttcagaccagcctgggcaacacaggaagactccatctctacttaaaatatttttgttttttagccaggtgtggtggtatgtgcctgtagtcccagctacttgggaggctgaggtgggaggatcacttgaacccaggagtttggggtgcagtgagctatgattgcgacactgcactccagcctgggcaacagagcaagaccctgtctcaaaaaaaaaaaaaaaaaaagaa

SEQ ID NO: 833 - DNA, 510 bp, Homo sapiens; identical to SEQ ID NO: 831

SEQ ID NO: 834 - DNA, 2211 bp, Homo sapiens
agacttaaatgcctacctctgtgctgaagctgacagacagtattaactcttatcaaggccatcttttagacctgattttcatttatatgaaaacagacctgtccatgtctaataagtaaaaactgatagaatacattaaaaagtcactggtttatcatagaaaagtttgatgggtttagagctcagtgatttaagcttgtaaaactgcattcttgggcaaaatatttatattgtatataaatggttggcagcttattccagttgatctcttcacatctgccttaaaagtgctatgtagagatacattaacagagttataataaaacagtgttttaaaatctagcctataaacaaaaactagtttgaggcacccaagcatttagtgagagattgagaatgatgcttaatggatcaaaaaagcaattaggagtatgttcctgattttattctctaaattatactcaatttcatggtaattacatgaagaagttacctgcaattattcttaacactacatggaattcactgggtaattgtgggtcatttatttcctgaaagtcacgtgaaatccttagctggttgaatgttgcacagtatttgagaattacggtttgaagtgatttctgtgggagggaatcattgcaatgtatattctaaataaagtcatctaactattaaaaaaaaaacacccttcctaacccttcttttcttaaaattccacattcatccacaatctcatccctttgtagaaattcttgcctgaattctcaccaagttttgaattcctaaggtagccccgatctaggatgtgaaggctgcccagaaaaagtttatggctggaggagtatcatacagtgtctacatatgatagtacttacagattaggtctttggatgctttaacacaaaagatttttgttatccttattagtcaaataacgctattcttttgtggttctagaccctggcttctatctccctgtgatttgttttaatgctgaaatgacttggctatccaaagcttctagtctagaggtctgttggttgaaggcagacatttccaagtttgttgaaataatacgaagctgactagcttacgtgaatgatgttgccctcatttgttttgggtgaggactcattactgcagtatattgatctcttcaccaaatgctttttctttttctgaataaatgctgtattagaggttctatttatatatgatttttaaaactttggtttccttctatccaccaaatactgtgaattgtttttccatttatttttcttagctaatgtaactttattcttcacttttttttagccctagacttcctagattttctgtggcattctgtaggacattgtattgcttggaaaaaaaaagatcaaaatcattctggggcaaatgctctattatccttatttatgacaagagaataatgaaattcataagaaattaataacattcagatattgctataaatgtacttgagtcattttcatttggggatagtaataatggctgtggcagctttaatggagaaacctgtgttggcctctttttctggcattaggatctcttgtcatagaactattggtaaagtacaggtttgatagcagagttcctgaattcagcatatcatcagaatttccatttaccttttgtcttttctttttattgtattttttaacctttttgtttctattcctacctcccatgagtaacattgatttctgctgaagttagaatttgtgttaagaattgactttaaacttctgaaatagttgaatattagaagtggcttcagttgccatgaaatgattgcttttctttttctttttttttccttaaataaaaataatgcagccttatatatgtctcttcccctcaagaatgtgaatttaggctgggcatagtgactcacgcctgtaatcccagacctttgggaggctgacacgggaagattgcttgagcccaggaatttcagaccagcctgggcaacacaggaagactccatctctacttaaaatatttttgttttttagccaggtgtggtggtatgtgcctgtagtcccagctacttgggaggctgaggtgggaggatcacttgaacccaggagtttggggtgcagtgagctatgattgcgacactgcactccagcctgggcaacagagcaagaccctgtctcaaaaaaaaaaaaaaaaaaagaa

SEQ ID NO: 835 - DNA, 2021 bp, Homo sapiens
ttttagaaaggaggaagccacatgctttgtttttctgctcacagctttgttgtgatcttccttcactaaacttgtaacatggtacaaattttgttataccgtctcctgttcttcctttggcccatttcccagacagaatttcccatgggttgagagatcaagtctttgcactttttttcttgttttccatagtctgaaaaaccttcaagtcagacaggaggcaccagtgtccagtacaatagaaggatgagctagatgccgataagtggtttatccaagacacatctttagtcccaaccctgttctttaccaatacttatgtgcacaggcatttatatgtataccaatatttttacctaaaaactaaatatattaaggccttttgctttagtgaagatgaactactgtaataattattgtattaggttgaattatatgaaatttcctatatgtgactgttttgacctacaaaatggcaatttcttatagttcaccctaatatccaatgtggaaattatacttggaattgtcttctagctcttttgattgaaagtgaaagaattaaagggttggaagagaacgttatacaggtctctatttagatcataccagctggtttttggccttattctttgaatctagagttgtgttccaaggaaccagtaattaatgcatggttataggtatacctggcttcaaaaaaaagaagtagccgtggaaagctatatgagaaaatcacaattttctgaatcaaatatttgtaaaacaatttggctatttaaagactcttagggtaaatactccctggaaaagcaagcaatccagacttatctggtctgcaaaccttgatttcagcttaatatcctttcctgaatctaattcattttcacccactaaggtcatttcatttaagatccattgtttttgaaattttgaagtagcccagtttggcagctctcagcacctgcctctgccctctcctatacttcaactatattgaactctagcttcaatctagttcctactaatccatgcaaaagttattaactgataagcccaatcttgttcagcacgttcttctaaatgcctgacctaaataacttctgcttggttaacttgtgttcattctcaccttagcctcagtgtgaaagtaacacttaccttctgtgcaattgtcctttgtacaactgaagactgttaataaattcaggtctcacctccatgtctgaaaaggctatagtagctattcatggagatgggaatttgtctaattacctagccagagtttgcatatttaaggtaatatattcagctaccgtatcttttattcatagtgcctgttttccagcctttgatcagttttgtagttcccgtggataaactccaagatctaaagatcctctttcagtagcatatactaaaattaagtttagtgctcaaaaccctggtaacctacactggcccaaggttacagtaggtaattcaccgtctcacattagacaggccaatgcatcccttaggagctgccccactctcctctcacctaccaaaggattttctcaggtgtggttccaagcgataaagttctactgtctcggcttcctgctggtaattcgctttcagattagcaataacactgagctgatctctagggttaagaagagaacattgaactcattttgtcgcatgtacccacaggcttgaaacagaaaatgatgtaaacttttgtggcatacattcacccattttcccaccatatctttactatcctgtgttgatttttttttcaaattacaaagacaatacatgttctttgtgggaaatctgaaaaatactaccaaatagaaaataaaaatcacctgaattccaccacgaccacattgtttaaaaccacatttctgggttttaaatcagtcagtggctgggcccaaaggcacttttgggtaagataagtgaagaaatgcccacaaggccaaggtgtcacttaaaaaaacaaacaaaaaaaacaagccagaaaaaaa

SEQ ID NO: 836 - DNA, 956 bp, Homo sapiens
gtctatcatttctttgtcttaggaatgtcaccaaatacaaaatgctcaactttcaggtaaccataggtaggatgagaaaaagctgtgatactattggcctcaggataaattattagaattaaatatatagaccataatagacctaagaatataaaagaattgggtatattataaaaatgacatttcagatctatcagaaaagtttggattattaatttatattgggatagctggttagctatttcttgagagaaatattagacctatacctcataatttttatcagaataaattccagatgaaataaagatttacatattcaagcacataaataaacatacaacaagactagcaggcaatgtgaatggatatttatataattttagtgtgaaagaagcctttctttgagtgacaccaaaggaaaaaaacagaaagaaaggatggatggaatttgactgattaaaaatgctaaactcctatatagtaaaaaataacaaaccaaattgagaaaacaatatatgctacaaaaagtatagatctcaaatacatattaagagcttaaacatcactacttttgggacatttccatgatctacaatccccttctcaaccaagtgtttccatttcattctttccttattgaacgttttcattattgcttgtttaattgcctgtttatccctattaaattggaagtataagaaggcagcaaccatgtctattttgcttattgttgtatccataacacctaacacagtgctacacaaagcaaatgctgaaaacatacttattgaatgagtgaataatgaatgaataaatgacattttataattcaaggagaatcaaactttccaacagaaaattggaccaagaacacaaactggcaatgcacaataaactaaaataacctactaataataaatatgaaaaagtgttttaatatactagtaataaaa

SEQ ID NO: 837 - DNA, 427 bp, Homo sapiens
aaaagaacagattcaaaaaccaggctgtttttaaaagggaattttaaagctgacattgtgcatgtctgctccaaaccacgccatgacagatgcaagaattatgatttttaaattatttaaaggttttttaaatgtattatacagaggaaaaatatttcacatataatagtatatctatagctcttgctgatctcatgttaaaatttatcgtatatgaaagaagtctttaaacatagaaatctatttaaaactgaaaaactgtgttcaaaaatccaatctatcaatatcattagaaataatattataagcaaacatataccacctcacctattgctttctctgcactcatttacatttagtcttccattctgtcagaatctaagagcttcaacataaaagtatcttaatttataaagcaacaaaaacc

SEQ ID NO: 838 - DNA, 685 bp, Homo sapiens
tataaatatgattttttaaaaaataaaatatatggttcatggagtctcgagtgcaaacatttgacaattttaagtactgtttgtattttaccattccaccatttttacagtttttggattgttaatagtcaaatcaatatgtttccttgaagcatgtttcatgcttcaacgtgtttctccttcaagtctgtcaatacttaaagctgaacaacctgcctctgatcatgtaaaaaagaatgatttaacctggaaccggagccaaaaatagagctttaaaggcaatcagggatgtcctatatctttagaaatagcactgtgatggcttgatctccttttcaatacaaaacaaagccaagctgtttacaagggtcaaaagcaattatttaaaaatttatattaaaaaaccataatcttctcttgttacctgtggaccaagaaaaaaaaaaagataaaaaaacttctttactaagaaccacatgttcattcaaatatcttgaaatgccagccagtactggacagtgaatgtcaaccaccgcagagtctgaggctcatttccactagagaaaacgaaacccaagatacctttcccttttgtcaatgtaacagggcattagccagactcatgtctaatgttataagcttttagccgagatggccttgttgcgacttccctgaagtcagtttt

SEQ ID NO: 839 - DNA, 425 bp, Homo sapiens
tttctgtatttaattggctaggttggcacgtacatacattgtttttgatgtctatttttatttaacagattcggtcaaaaggtaatgataacagaaaccctttctcattgtcaataaaaaaaataataattccagttctctgtttaagctttgttttctagtcacataaggctcgacaatttacttaaactatcaggaaatgtgttctttgggtgacccaaatatttagcttcaaaattgagtctgccacaagagggagatctaaacttgcttatgggagtgatcttaaaatttttttctaaaaatgtggcctgagtaggaacaatgagaagtagctttctaagctcatctaaacatgggcatcttgattcatagaaatgaaatagaatataggaactacgacattataatgccataactagatt

SEQ ID NO: 840 - DNA, 6065 bp, Homo sapiens
ggaatgatagaagaggaagaatcagatcatttgggttgggaaagtctgcccactgaccccagagcccaggaagataattctgttacctcgtgtgatccaaagccagaaacatgttcctgctgttttcatgaagacgaggatcctgctgtcttggcagagaatgctggattcagtgcagatagctaccctgagcaagaggaaaccaccaaagaagagtggtcccaagactttaaagatgaagggttgggcatcagcaccgataaagcatatacaggcagcatgctgaggaagcgtaacccccagggtttagagtgaaaacagccagtctgaagtatccattactcaagtcccaaggtgacctctctctcctcagatttccttcttggccctgtgccctgcactttcttcactgtgttcaagtgtcatagctatcaggccactatcatggatatcatgtatccttcctggtgctcacacacctgtcaccttgtaaaacacggacattagtgtgaacacaggacagcttcgctctttctcttcctgcctttcctctatcagagaagttgatccattaagtaattatgtttggtctattgtaattacagatgggaccactcaggggcaaaggtctgactcttcctggtaggtgtaacagatagttcacctgtgaacgaacatcagcttacagatgatgaggacttaaggttgcaagaatgaagatttcagactccaagatcccttattctttgggccttgagcaggttagtagtcccctggtgagaagagaacattttgtttgtggggctaatgggcccagaggagggtaagactctgctgtctaagctgaagcctcttcctcgcagcgagggtcttcctaggaacattgatgctgcctcagacatcctcttttctccagagtagggaagactcccactgatctgagaatgagcccagacgcttgtttggggactgttttactctgatactacctggatatctagcttcctttacccctgttctgcttaacagaactgccaagcccagaagtacctttgcactcctggttttcagtggacagaggaagctttagatagagactttagaccctgccctgcagagtcaagacttgaggccattgaagctgcaggaagccctgcccagggatggtcctgccatgaggaggctgcaaccctataagagggctcaagattgtgaattctgctcctgccatgaggagctcagaaggccaggaagccagcaataggggagagaatctgtgtgcttatggacagtccttacctaaagctgtttctgaatgttgcaccctttgagaaatttcttctcagaaccataaattgaaacaaatgaggactgatcttgtatacaaagtgccaactcaagagggaagttggagtatgtctgttgcagagaaccaatatagcagtgcccaggggtagagaccatgtgttccatactcggatatttgggtctttttgagagagctggggaaagtagcagcaactagattaagactgggaggattttgaccaaactaaaggccttttctccttactgcatctgacgtgtgtcttcttgagacaagatagcacccatgaattacatcatgaggtatgtgtgaattcagtttacatgtaagacctgagagttcgaagagggcacattcccaaagacattcccagtcatgaaatgtagaagactggaaaattaagacattatgtaaaggtagatatggcttttagagttacattatgcttggcatgaataaggtgccaggaaaacagtttaaaattatacatcagcatacagactgctgttagaaggtatgggatcatattaagataatctgtcagctactactaggcatttattgttaattgagttacagaaagtcattcaagactgagtttatagaaagcatattgcatctatctctgtgtagaacatttgattcacattgtgaagaatgcagtttaaaatatactgaatgcaatctagatgtattgtacacgaaaggtgaaaaataacaggtgctctttactgtttagataaattgttttctgtgttatttcccttcgttcactgtgaggggttgattcatgaggagagccctgggttcctggctcaggtttacttttggccttaggataggattcccttattagagataaatactgctgttctcttctagctcattcattcatttagcagtcaattgctcagtgccaggtgctaggaacagaggctcaatctctaccctcagaaaactcagtgtgacgagagagagcctgacagataaaatgaactatgaccctgtaagagggctcaggatcgtgaatcctgcaggcagagaaacatgagccataatctgtccctgcattttctagctgtggaatcttgggtcagctccttaactggtctgagctttggcttcagggtagtaaagggaggggtattaaaggtcctggttaaatgaaatcatcagtgtgtgtaaaacagcattggttctagctcatacatgataaccactcattaagtggtaattatgtttttattataagggctatgctgtaattcagacatgggcccaaaactacaggaaagataaattgtttttgctaaagtattgccaagaaacttcacagtttcttgggaggtgggccttgagcatgcaaagaacttcttcaggtaggcaaagaagagaggacactcttggcagaaagagttgttgaaaaaagcagtagggtgtgaaaatacatggatgttcaagtattttggtgaggctgttatgtaaagtgttgttggtctttggggaaaattggcttatggaaattcctgccagaagtactaagcccttatggtggttcttcctgccctagctcttggttggtttatatataaggaatatatttgtgtatttatatatcagacatttggatgtacctttcagttatttaggatttagaaaattctttttggattttccagaattattttatccttcggggatgacagttatatgtgtatatacaacccaggatgacaaaatcatgggtccggtttttgttgccagggctgctgtctcttttcttgcggtcttcatttctcacgagggtgctgggaacttgatcagtcccctggccttttggcactgtggcagagtacacaagtcatacctttatggacagttagctcacaaaacaactgcataatctgggatcactcttggtaaatcaggtgggtggtgcagccaggagatcccctttcctggtcacaacaggagcacaaagaaaccattatctccatgactagctccagaagctgggcccagggagtcgtgatgaggagtggaggtgtatttggcctgtagaatcaacggcctttgagaaccatacaatgcaccttatatggcttgggtgatcaaataacttaaggtccaaattcaaacactttggaaaaagggagctttaatataattatgccaaggtgataggcataaactaagactgtcctggacgtagggtcacccctgtctatagccatttaagatttttgaacctgatgactaaacaaacaaaaccctctttcctttttagaatatcctgtatgcgctatttcccaccagaggcagaggccacaggagataggccatggttcaggtaggaaatgctcttggtcacatcagaactctagatctgggggaataaacaaacccgaattattaccacactctcaaagttctcttcaatctggactatttgtattccaaagaaaaatttagtgctttagctattcagcaatattgagaaaaaacatgaacacatttatgactttgccttgaccattgacttttctaaaatgtgcttccttttcctttatttccctttttttatacaaagaaaatagcccaaatttctcctcttaggtcattccttaacctctcagagaaccagtttccccatgaattgggaataatgctctatttacagggctgtttggattaaataagatgctgtttataaagtgtctgtgccagggcaaagcatgtggtaggtgcttggtgacagcatgatccctgtcaccactctgtcaagtccagtgttgctgagatgtcacacctgacaccctctaaggctaccctgattgccaggagtggccagggcccttctgcagtctccgggtgcctttagttataacctcttgtctgggtcagaccattagctttcatgtctgcttctagctacaactgtagcctcccttccttttgccttcaaatctgccacagctgcccggcaacaaaaaagattcctaagcatctcgaggtcctgtttaaatgggttagggtccaagcaagccctgagacatcaagtggttgggtcttttatacctttttcatctctacagccctgttctcttcctaaggccaggccacaggggatactgaggaaccaccagccccttcaggcggcacagcagaccctgaagagaactgctctaacttaagtaccttctgacttcaccatttttccagcctctgggtgtggttctgatgaaccttaaacttgaaaggcacaggccagaggaaggacagtgttgacccacatgtcattggtgaggttatgatctctttgctattatcacctacttacccacctgaggctcctaggaaacaatgaatgaaaggtatagaaaaaaattaggaagtaaacagggcttttttcccctttatgaaaaaagtacacacaagtgttgaaacgattcaagtttaatttgttgatatatgtgtgtacttagacaaacactaaattctacaacatacataatgtcaacatgggaaaataccaagtttgtcattgcacataccaataaataaatacatttgctccagaataccaaagtttattcaaaaagtcaataaaagcacagttttgcaaatttgtctaaaacgccagataatcttgaacaaaaataaaatgtctgaccactccaaaataggaaaagacaatcttgtgcaaatagacatacacagtctaggcattgtgaaaactggctgtgttcccagcaagagatactgcaccctcctgaccgagcagtcaggcttccctttcctagccatcctaagttgcgttctaggaaactctggatctcagcctcatctccagctttgcctggaccttgctagggggagggagggacaggagcacagaggaggagaggagagggatgtgatgtctttcttaggaaagaaaaaaaggcacagtgatgagctataaaggtagtgatgagagctataaaggtagtgatgaaagcaaggaataattttcattcaccccaaatcctacggcaagctttgacaatgtaacatctttatcttgtggttaggaaaatggacctagagagattatgtggtttgctcaaaatcacatagctactaagtgcagtagtgctttctataagaccaacttgcctttccacttggttggaaaatttaaaaaccaaacctgtcgtaatctatctgttctgcccctcccgcctgtatcatgagatgactgaaaattccaggtggccataaactcaaacaagagcctagcccttgcgttattaccggtggctactacaaacctacagaccagagcccagggtagtatagagtcccaactctgggccctgactgcaggtcattcaggtcccagtcacagtgaaagcagactcattcagctatctggagaagtgtaatctgagggccacttggcatcctgagttaacacagggatgccgcagctggggtaaggaattagagaagggaaggccagtgttactgcagtaagagaaaaccaggaagtccatctaggagatgaaatttgtgcttgcataacagagccatggaaatggctatcccagcatctcccctcactgcagactccattgtaagcaaagcatggacctttttctttgaaaccaaccctgtcacttgttaaatttagaattacctctaaatgctaagtttatttaagaggtaaatgtcctgctattttcagaatggagaa

SEQ ID NO: 841 - DNA, 7591 bp, Homo sapiens
accaatggctgtacacagagtaaaagtcacatttaaggatgagccaggagagggcagtggtgtagcacgaagtttttatacagccattgcacaagcatttttatcaaatgaaaaattgccaaatctagagtgtatccaaaatgccaacaaaggcacccacacaagtaagtactctacaaataacaagcagcttaaaattctttccttgttcctcaaaccaacagtggtaatcatggtttctatatgtgtgagtgcataaatttgcatttttacatacttttattctagattgatttaatcttgtttaaactattctaatggacaacaatttgctattctacggacacatttattttgataaatgtttgtgattgtactagtttttcatctcaattgttacatgttgtgggtgggtaagaggttgtaaaatacatagtgatataaaaattcaccgatcaaattgcagcatttcctccacttcaatatttaacccacagggatatttgagaagaaaatgctattctaagagcagtgctgttcacattatgatttccaaacttgctcctggtccccagtgagataaggactttacaaccaaatgcaaatccactgtgtcactaagctcactgtttagcaagacttaaaacaaaaaatcctggtgcaagcttattaccccactgaggatcaacactttggggttaggactcttagctaagttttaagattacaaggatcaaattttaaaatttgtgaaaattacaaaagccttaggagattcacatcaagtaggagcagaagattatcagacttgtaggtggatggagactgactgagctgtagaaaggattgagggtgaaaaaatgggtgagagttcctcagcttttcatcagtttcaccatttcactttctataatgttataatgagaagaaattaggagatgtgaatgaggaaactgggaagtcttaacatttccaaactatctgttttgtacacttataggaaaccatactctggcttgggcttaggaatttaaaaataataataggtaatattctggtggcctttaatgctttcatgccaaaaactaagaacagaggatatttaaatgagtctagtcatgtaagaaatttcagcgttatttatagtgacactatcataaccttacttgctatatattatttcacagctttgacatgacaagggagaaaattgattaacaaatattgagtgaacatctatttcgtgccaggtatattctacacaatcacctccaaccctgaaaacccatagggagagaaaggcattaacaacacagatgctagggaaggataatctttagctgtcatgttttcttacatttgtctcatttctttgcattgactttgaaatttaaggtagttgaatttgcattcatctaaatacagtatatttctgattttcttctaggtttaatgcagagattaaggaaccgaggagagagagaccgggaaagggagagagaaagggaaatgaggaggagtagtggtttgcgagcaggttctcggagggaccgggataggtaaattttgtatctttgattcaataccacctttttggatgaattagagataggcctgtaaatgaaagaatcttaattatggattattttttagaaaagtaaagttttaattttgcacatatgtatagtaactaagaatagtctgttactaaaatacaataactaagaattagtctattaactaataaaagttctgctttaaaaacccagaggcggtcgaaattatattctttttatctgactcaagttcctatttgaatttttttacccatatcattctctcctaagtttatcttaaaaagtcttcatttttcaggccacatgcggtggctcacgcctgtaattccagcactttgggaggccgaggtgggtggatcatctgagttcaggagttcaagaccagcctgaccaacatggtgaaactctgtctttcctaaaaacaaaaaattagccaggtgtggtggcgcatgcctgtaatcccagctacttgggaggctgaggcaggagaatcctttgagcctgggagacagaggttgcagtgagccgagattatgccattgcattgcattccagcctgggaaacgagcaaaattctgtctggcaaaaaaaaatttaattttggcagattgtgctatttagaatctttgaagttttctcttgttaagatggattgcattttacttttgactaaaatttccagaattatgtgtggactcttgatatctggtatgttaaggtcctactcccttacaataaaaattttaaattaagtaacaaaatctagataatctttatttcctaaccatcatctgttttggcactctaccacctaggtaccataactgaacaacctatatgctctggttttctaacttttttactagttgtgctaatatttttacttgttagtcaaaggaaatgaagtcataatagttttccttctcttacagagactttagaagacagctttccatcgacactaggccctttagaccagcctctgaagggaatcctagcgatgatcctgagcctttgccagcacatcggcaggcacttggagagaggctttatcctcgtgtacaagcaatgcaaccagtgtgtactgtgtacttagttacctcttaactggctgtgttatttttttgcttttgaattaaagatggtgtttaaaaaaaattgtcagctactggcaaaaccacatgattgaggactctttttagctctgcagtaagaaggaagctcaggagagaataaggcagtgtttactgaagggtaactgtatagcttgaatttattttttcctccacccaccttatgttgggacactgtctccattctaccttccttgcatgctaaagaatttgctgtgcattatatttattgtatcttcatttgaacaaattattactacttttggagcagactttatctgttagcaagctgtagttggaacacattaatgctgattagtattgcaggaagaattttattttgaatgttctatcaagagtttttctttatatgatatgaaacacaaattcgttatgttttttgtctttatgcataactgtatgtacacattttatagtgaaagaataacagaaaactattatttcttccagcaagtcctcagccttaaacataggtatatttttctctaccctacccccttctttttttctaccctaaataaaagatatttctggctctctgatgaagaaaaaaatatggaaattgagtatatgtatgtttaactcagagatataaaaaaacctaaaaagaaaacttgtcatacaaatattataagtagccttaacaagatgtggtactgcatggactgtttattccctgccaagtttctctataattgatcttccagtttcataaaagaccttactggttctgaaattttgtatttgttacccaagtttcttattttattttttttttaaataaaagattgtagatgtaattagacaagaggttttagagagtagtcaagtaacatttgttcatcatttacaggcatttgcaagtaaaatcactggcatgttgttggaattatccccagctcagctgcttctccttctagcaagtgaggattctctgagagcaagagtggatgaggccatggaactcattattgcacatggacggtaatgtgtacaattgggaaggcatttcagtttaaacatcagctacttactttcagtatgtgggtgccatcatatcttaaaatttatgtcataaagtataagactttaaatgcatttttatttattttttaaatgatagcttaaattccatgaatgagacagcttagtttcttctcatgtattagaaaggtagggttttaatagttaccaaggttatttggaaattacttgaaagaaagtacatctcaaattcacttatcagaataccctcctggcaaaggccatacatattatactgtgttcttgccataaccatgacatttcttttaggcttcctgatttgtcttaaaaattcatggaagtttttgctttctattctgtaaagtatgaatttaatataaaatctaaaaaatatctaacagattacatatccctttttccaaggtgacaagtaaaagtgacttaggaagataaggccgggtgcggtggctctcacctgtaatcccagcactttgggaggctgaggcgggcagattgcctgaggtcaggagttcaagaccagcctagccaacatggtgaaaccgtatctctactaaaaaaaaagttaaaagtggctgggcacggtggctcatgcctgtgatcccagcactttgggaggccaaagcgggtggatcacgaggtcaggaattcgaaaccagcctgaccaacatgatgaaacccgtctctacgaaaaatagaaaaattagccaggcatgatggtgggcgcctgtaatcctagctgctcgggaggctgaggcaagagaatagcttgaacccaggagggtggagcttgcagtgagccaagaccatgccattgcactccagcctgggcgacagagcgagactccatctcaaaaaataaataagtaaataaataaataagctgggtgtggtggtgagcacctgtaatcccagctactcgagaggctgaggcagggagaattgcttaaacccgggagacagaggttgcagtgagctgagattgcgccactgcactccagcctatgtgacagagcgagcctctgtctcaaaaaaaaagaaaaaaaaagggaagataggtcacatttatgctgtagtttctatcctggggctaatctgatacccagtttgaaactttgaagtgtttattattttagatgaaaagttgtatttttttcttcctaatgagttaggaatttagattagatacactcctagagatgtataagctggtaggctgggcactagagctaaacagccacttctagagccttttaatggtccaagccaaagactgttgagagaactgtattttctttgctgatgctcttttcttctctggattttatgtactgttcgtttattcctctgccctgtctctggagctactgcatactggtatagcttagtccattatagaaaaatcaagaacaatgtacatttttggtgaaaagatttttgtgagtatatgttaagagttgcgtatttagtcatgttttctgttgaatgcaaccaatgtacaatattgacagctttcacctggctttctggagtaaacagtgaatttattggtgttctagaatcattaaattcgctagagaatttgctagtgaatttggattgctttctgaacatttttctgttcttctgtagtgctccctctgagcattgtagaagtgttccagcacccctatgaagaccacattcattttgtcagggagcctttagtccactatcttgaatcatacatgaaggatctagtgatacacttttttaaagatttgtattaccaacttctctgctcatactgcattagtactagcaggtgcattggatatttattgactccaaaacttgaatgtattttgtaagtaagtccttttaaatttaaattatacgctaaattctagaagtctccgttatctggaatgtgaaaggctttttgtttttagggaaaatggagctgatagtatcctggatcttggattagtagactcctcagaaaaggtacaggtaaggaacattttattcatgtgctgataatcacagaatttaaattacaaggaaatttcaataaaggggatgaaagcaggatttctgaagaaactgtctttataaataaaatgaatgtttacagtagagagacagaagcaaagataaatatatcggtattatgcatagaatcaaataataagcttggcttaattagggctcagtataatcccacccattggttggcatccatttgagcacagcttgaattaagctttactttgaataagtaacaaattgaagaacagagagggaaagatgtatagaatcctaggactaattcaccaggtgtggtggctcacgcctgtaatcccagccctttgggagaccgaggtgggcagatcacgagatcaggagttctaggactcctgggactcattcttcaaagaagtagctggtgccaacattgcaaaaacaagtgacatatcatgctatagcataaggaaggctttttagttggcattgaaacaattgcacatagaaggtgagacttccaatttgaacctaagtaggttgattgcctactaaattcatattaatttactaagactcagagttttcacaactaattcacaatgcccaggatacactctaaaattactcagcctacaaagaaccaggaaaaactggatccacctctctcaggaaaagaaccaatagatggcaaccacgagatgacccacttgttggaattatcaaagactatcccatgttctgcaagataatggtgaacactggtgaatggaaagacagaggttctcagcagacacacacaggaacttcaaaagagaacaaagggaaatttttagaattaagagggcaatatctaaaagaaaaaaattcacaggatgcatcaatagctgaatgaaggtgttggaggaaagtgtcagtcagcttgaagatagatggaaattaccctttctgaagaacagatagagaaaatattttaaaactaaaggacagtttcagggagacctgtgggacaacttcaaaagatctaacatatatgtcactgaaatactcaggggaagagaagaaattgctatagaaaaaatatttgaagaaataaatcatggctgggcacttcctaaatttggtaaaagacatagatttccagattcaagagtcagtgaactcaacagaataaactgaaagaaaactatgtccagatacattataatcaaacttctgtaaaataaagaaatgttattgaaagcagccaaagaatggttctttacctatagggaaacagtgatttgaaagagtggatttctcactataaagtatggaagccaaaagtcaacaaactcatcaaagtgatgacagaattctgtatccagtgaaaagaattttcaggcaataaagtgaaagaagcttatccgagtttcattaaatgactttattttaacaacagagacgttaaagacataatacacaagctttgtgtgtcacattctgaaagggcaaattaaaagttcatttacctttaatattgttatacacatatatttaaatatttatgttgctcttcctacctgacttcatttgaatgatttgagagaaccatttcatatgttttgttttttcagtgaatcttggggcttactctctgatattctctgttagcaggaaaaccgaaagcgccatggctctagtcgaagtgtagtagatatggatttagatgatacagatgatggtgatgacaatgcccctttgttttaccaacctgggaaaagaggattttatactccaaggcctggcaagaacacagaagcaaggttgaattgtttcagaaacattggcagg

SEQ ID NO: 842 - DNA, 329 bp, Homo sapiens
ataggtaagaaatagcacctcagtatagttttaatttgaatttatcttattttgagcaaagttaaacattatttcatatagttaggatagttatatttaactcagttgatatgcccatttttctaagttggctttctctcagatttcagaggctttttatgtagctgtaggtgatagacacactcattaattaatatgtatctttgtgacaaaaggtgcaaacaatttttccagtttggttagtccccctccagcctcccgcccacttagcttgtcatcaaggaatctgttttttttctagtattttttttttaacatctctgatcatt

SEQ ID NO: 843 - DNA, 18678 bp, Homo sapiens
cggcggtggctggagcgggagaaaccggactttgtgcaactttggccatagtggccatcccatgaatctgtttactagcttggtggtgggtccaacagagcttgttgctccctagccgcttgctcgtgcccttggtggttaccggtagttaagcttagggcgcatagggccctcgtggctcgccacctctcacggttcagtacccacgcttcgaacgagggatgggagcaggcgccacggccggcaccccagagccctgctgccccttagttcgagcggccatcctcctgtggggcttgtgggcagcctgtggggtttgtgggcggcctgtggggtttgtgggtggtctaaggaaagagttggggcactcaggggtctgctgtttttgcccgtggccttaactcatcaggggagggtttctgcagcagaatctcgggctcagggttggcggttaacgagggagcagcggggtcttggggagggggctcgacacccctgaaggtgccccctaaaggagccactgttagaggggcaccccatctttgtggccatggcggtggtagagcggctgggaggggctctgcggcgagcaagggagcaggcggtaggggttctgcggcgatgggcgggctaggggcggggcgcgggtgggctctaaaagtcggtgcccactcgctccgcgctgccgcggcaaccagcacaccccggcacctcctctgcggcagctgcgcctcgcaagcgcagtgccgcagcgcacgccggagtggctgtagctgcccggcgcggcgccgccctgcgcgggctgtgggctgcgggctgcgcccccgctgctggccagctctgcacggctgcgggctctgcggcgcccggtgctctgcaacgctgcggcgggcggcatgggataacgcggccatggtgcgccgagatcgcctccgcaggtgagtgtgcggtgggaacgagggggtgtggctggcggccctgggactagggcgcaggcgagcggaggactgtgtgcccgtgtccgagctggggctgcctctgggcgaaaactctaccgacaggcggcacgcattccgcgcccgctctgcctacttgaggagggggtgtcactcctgcccgcaatggaatgttcagaacgcgggacctccttgggttaggatttctagaccccgggatcgtcgtggtgagatttaggatttctggaccccagcgtcatcttgatatgacttaggatccataatgaccctggtctcaccctgatgcgaattgggatttttagatcctggcatcaccctggtgcgatttaggatttttatactcagtcattgctgcagcatgatttaggatttctaacccccagcatcgccctggtttgatttaggatatttagactccggcttccctctggtgcgattcaggattcttagactccgccgttgccgtggcgcgatttaggatttatagatcccggcaaagccctggtgcgatgtaggatttttagaaccccagcatcgctctggtgcgacttaaaggataggccccagcatcgccctggtgcgatgtaggatttttagaaccccggtgtctccgtggcgcaccttaggatttcaagaacgggataatcgcagtgccgagatcgccgcggtgcagcttaggatttcaagacccaggtatcacggtggcgggagtcaccgcagtgactagaactcgcagtgcccgtcagccgccttaagtatttttcagatttcagtaacaagcgcgagtgagaacggcgatgtgaccaaactgtcatgttgcgcagggattgttcaccttggtttcgcgggttttcaaagtggttcgtctcgcggcgacgccatcaggtgggcggcaggttgggtggtattattacgggagtgtgtttttctgtttacaagatgaagaaatcaaggctcagaaatttttggaaagtttgttactggagtttgcttattgtctccgctcatggctcatcaaatagttgggattttggccaaaaaatgtttgcttaacccattttgcctactgacggctaggttgcttcacttctaaaaatcctaaaagttcatgggggcatttttactgaggtaataagacaaaaaatggccccctgagaggttgcctctttgctttcttggagtaagaggaggagggtgtggaggggggtgtccaggagtggagtatgttggtcgatagcctcgttttttaaccccccactttccctgagcagcggcggggaagcctccccatttgccgctctggccgcccctcccggggctctctgctgagtcactgcagagattcagctgctggaaccccggggatgaatgcgatgagaagcactgggggaaaggagtaatgaaatctgcacatgaaaatgtatacattgaagtacaggacagatagggctgggcaaatgatcgtcaaaacctaatggtttttgtcatctgacctttcaaggagatactgggatacagcctgctattgttgggtgaaaactgtgatataaccatcatgttctggcacttttttgaaccatttctagtattaccttgagaagtaggaccaaatggttctatccgtcttatggacaggtactttggagaaaaaaagaaatgactgccctaataatgcctaaaaaatagcctggggagctgacattgtttaagaaacatggttattttaccactgtaaaaccacaggcttgtttttagattttagcaaaaagtatcagggatatgggggggaaaagtatcttgtaagttgaggaagttagcgaacgggtaggtagattacaggcaatagggaagaatgtgtgtacagacggaaagccatttcccccagggctttagcaattaatttatttcagctctatgacaactctaattttagttttggagggtattatttccattctggctgttttgagagaacttccattctactgacaattcttgatctgttgaccatcagaagtcatagacttgaaacagaacggtttataattcctgtttggcactccttgtcaatgtggataaactgacttgtgcctttgaagtcctgggcatgggagggttgggtgtaccaaccagtgctctttttccaaagacaaaatcaattctcacacgctgggtatgagttatgccttatctgggggtgggggagcatcttaggaaattaaatggaaacttaaagagtctgctaagaaaagcagaaatgtaatctaccgccttgacctctcaagagattagatattcagggtcatgacaaagctgcttatgttggaatacacagtgcagctatcttactttcacagactgtttaccctgagcagtttctcagcccaaatccagaaaggagtactaaatggggcttcatttaggcaggagggctgaaaatcaggagtagctctctgcttgaggacatgtgataagttactacacacacacactctttaaaacatgagatatagcacatatatattttttgaacattttactggttgggggtagtgggtagatggtagagcttttggagtaaataagaaagaagttatttttttcctgggaagccttgataaaagtcaacgaaagagtgtccagcatttaagtcatgtcccttttatttatataaagtcctcttcagcaggtattgggaagaccacaagggtaggggctaaggggttaaagtcggggagcagaggcagaagattatatgttgaaataatgtattttttttccttaagattagaatgatgaacaaatatggtgagtgctatggcagacagaggtttgattatagtctcggtcagctttgtgcctatgtgaagggcaatgtaatcattgcatggtaacagcaatctcccaccccatcttaccaggttttggtttgtagatgagtggacaatgttacctgactgcttacagtgggtctctgcttttcctacaggatgagggagtggtgggtccaggtggggctgctggccgtgcccctgcttgctgcgtacctgcacatcccaccccctcagctctcccctgcccttcactcatggaagtcttcaggcaagtttttcacttacaagggactgcgtatcttctaccaaggtaagaagtggactattggaagtcctgcgtgtatcggtcacataagtcccagctgaggtatttattttgtggctattggtctcttgttgctccttaatgatggaggagagtatctctctctctttctgtgtagtgtgcttgcagagaagcgcagaaaactgctgggagaatgggggtagggactgagattccaacctgcagaccttaccttttagtataagttttctttgtagcttgatatgtattccaatattagtttttttttttttttgagcaacctgtcaggtaatatataaaatattaatagatataaccaccattggttctctctccttaccatccctgatttcattttttctgtagattatttgtagtgtaactgtgatttaagtcttgataccattatataaattaatttgctagtgatgatgattattatgaccactacttatcaagtaattaccatatgccaggcactgagttatgttttcagccttcattgtttaatctttacaacagcatttggagataggtgccattaacctcattttataggtgaagaaactgagaaacagattggaaatgatttgttttgagcgggggtcaagagcaataacgaaaaatgtttgtcataaaccgtttttcattattgctcctgacctcctctcatttgctatattcaattaagtaagtatacaatttttattatgttggcttgggttacttccagttttactgttttagaaaactaatgttgaagtaaaagcttcatgtccatacagtttattttttccttacattttcaaactatactacttgtataaatggaatgattttatttgcacagattctcaagaacaaaactcttaggctaaagtatatacaatttttaactgcttctaaattatttttgaaaaccttattaccaaattttcatgtcactggcagtatatgaatatacctgttctaatcccatactattagcaaggttaatattgtctaaatgtttacctaatttagatgatgctgaatgcttccatattgtcatatgcattaaaaaagttcatgtttatgttgattaagccctttttatagttgacaggattttgtaatagttttattatgtttttgatgttagattgggtctcctgctgaataaaaagtgctgagcaaacagcataagctaaaggtgttccttgggaatagttgctgtatcttagagaatttctgtgaggccattcatgataaagtacaaagaatttgtagtttatgtgttgtgatcatatgcttttaactgaaaatttacttttcactgaaaaaatttgcatattacagaacaaaaggagaaatggggagatgctgtttaaaaacacctaggtgaaagtaaacaaggtgccttcaagtattttcacatagcatgatttttacaatgttttaatatacagattgaaaggagaaaaggcctgttctcacctaacgcagttaagcttacattttacaaataattgtgtcattttaatgtcaatttggtcacagttgcttgttctttgtatcagattacttagattttaacatcttcgaggttatttttatagggatttggcataattgattgtactttccttcttcctagactctgtgggtgtggttggaagtccagagatagttgtgcttttacacggttttccaacatccagctacgactggtacaaggtaatgaagtcagacttctacgtcctactatgtcttaaaaaatctcggccgggcgcgggggctcaaatcctagcactttgggaggctgaggtgggaggatgacctgaggtcaggagtttgagaccagccaggccaacatggcaaaaccccatctctactaaaagtataaaaattggccaggcatggtggcacaagcctgtaatcccagctacttgggaggctgaggcaggagaatcgcttgaacccgggaggcagaggttgcagtgagctgagattgcaccactgcacttcagcctaggtgacagagcgagagtctgtctcaaaaaaaaatttttttttaataaaaatttaaaaaacctcaaggattttgttgtcagcaccagaaggctcttgcacatttgaattgcttttaaaaaaacattaaatgttgaactgttccttatttactgaagggaataaacaactccttggcactctggaagggatcactgccaagttaccctccctcaacagggattaattaccaggaataaagcattttccaagaggatcatctgtgggacctgtggtagtttcatggcgttttctctttatggaagtctgttaagccaagatagggctgaagctcctgtgcaactgtaggtctggtgaaagggaggggcaggagcagaaagcccaaatcatcgtttctttcttgtagatttgggaaggtctgaccttgaggtttcatcgggtgattgcccttgatttcttaggctttggcttcagtgacaaaccggtaagcagcacctatgtggggctggtgatggggtgtgggggcagacgcagactatgagggtcaggctggcagagagagctgtcctcatgacttcatcctgtgtatgtgggctttcctttcctcagagaccacatcactattccatatttgagcaggccagcatcgtggaagcgcttttgcggcatctggggctccagaaccgcaggatcaaccttctttctcatgactatggagatattgttgctcaggagcttctctacaggtcagtggagcttcagacttcagcttatgatgctaggaaagtacattgtttctggactgtttgtatcctttttctctcgttttcagcggtgcactggtttaagtttgctcagctacatgtgtgtttcctcgtctcccttctaggtacaagcagaatcgatctggtcggcttaccataaagagtctctgtctgtcaaatggaggtaattgccttggcggtaggtagaaagtgggtgtaatctagaagggccatctttagatacagcggcacctaaatggtaatctgataatatttcaagtagacataattaaactatgggatctctacctcttctgtgccatcaactcctttggtggtctgacaagatttatggaccctttctcagaatgttttaaaataaagaaacaaacagcattacaaaggatagtgactttacttacatagtcaataaaaagctgcattatagtcacatgtgctttttcaatgcattagatagcaagttctagtggaggacctagtaacagctatatcagaaggagtgaggagtgtaaagactgtttgccatatctgaaacaactgcaataggttatgagagtgtaggattgaagatacagaaaaaagccacaagtgtttctaatactactatgatgttagtgtagaaaatccttacttaatgtcatcaatgggttcttggaaactgtgactttaaatgaaacgttataatggaaccaattttttttctcatcaatgttttaaagaaaggatgttattcaaggacctgctgtacctcattctgcttaaagccgaagtttccaagaacctatcctgatgttaagtgaggacttaactgtatgagattccccaactcctaactgatggcagtgccaagtttcagttagaaaataccgaacccctgattagactttctgggtagccagcttgcaagttcatgaatatccaaatgtctcctgaacgccttaagagcagactgggagagaaatccgtctctccctttatcacttatgctcatggctttcttccactgactctgaagagaaagggaaaaggaaaaactctagggtttttaaaggacctatacttatttaaaaacttcttgttttattcttacagcccaaatcattaaccctcgtgttctgagtgatagggggaaatgctaaggggagtcagagcctggttatcagcattttggatgaccatatattttctccccgtttcactatctttaagatgggaaaagtaattccagtgggatttattgtgaccagttaaacacagaattcctggagaagtaattagatgacagttttaaattgttatttgtaattctgttttggtagtaaaggctgcagaggtgatggtgaatagggtgggtagtttctgataatgggcttgcctttgacctaaatgtaggtaggctgggtgaggtggcttgcacctgtaatcccagcactttgggaggctgaggtgagaggattgcttgagctcgagaccagctgggcaacccagtgagatcccgtctctataaaaaaaaaaaaattaaagctgtaggtaaatgactaagataagtctcttctacaggtatctttcctgagactcaccgtccactccttctccaaaaggttggtacttcactgatagacctttagttttaggatttgtactgacgtaaataatgctgggaccttttaagggccatagctcctgtaactggcagtagttaaatcctcttccttgtgaatttctattaatgaagttactttttcccttcttaggcaactaaagcagaggcagtggcccctacgtaaacccaaaaccaatcctaagaataagagatcaacaaatatttggagaaattacagctatggaaagatctgtgtcacaagcttgatgtttgaacaaattaggatcctactctaaacttgaatatatcagagttaaagttttagggatttagtgaattgtagaaaagtaatcttagatggaattagaaatagatttgtcttccttgagagaagaatgcgggtaggcaaaacaaaatgccaagtaccaaaccattcagtagcaggagatttggctaaagatttagttcctagtataaaaccttttgccccggtgaggatcttcctctgggttcttgagctttacctccacttattcccctccagctactcaaagatggaggtgtgctgtcacccatcctcacacgactgatgaacttctttgtattctctcgagggtaagtgtcactgtcaaagattgtggcctagagcaatgtcgtgaaaagttgctgccattacaattctgggccaaatcctaaggcttgatattttaaagcaaaggtgttggccgcttgccagggaagtagaaggaattcataaatcacttatgggtcagactgcatggcccagactgcatggcctctgaggttccagccatattgaacattctgagttctcctcacacttatcttcctgcgttttggactctttcagtctcaccccagtctttgggccgtatactcggccctctgagagtgagctgtgggacatgtgggcagggatccgcaacaatgacgggaacttagtcattgacaggtaagaagttaccctttgctttggtttccagagacgtgtttttgtggagagtggggattgcttgttctgttccttgctggcttattccctatcacaggaaggctgatgatgacctatggggcaaaccaaaaagtcatggtctatatgaagaaagaaatagaaaataagagtgaaactggactctttgttagtattaaatgcttcaaagtattgaatcatggttgtgaaagtagcctagtgcctccctcaaggtacaaggctcttccttttgcctatctttctgcagcaacggggagtgagagggcagacttctctttctctgtcttgtacaaagaattcccatgccttggttcaaatgagaatgtagacactttcacaagggacccagaggtggtgatagctgtaactacttgggataagactctgacttctagccacctggctcagtgtagcttccagtgtttttactgatggctttgctggggattgtatgttagagggagccaatcctcccaccctctcctaagccccaacaggatccctgaatatttcattttagtattaaaaaactgaagaacaattaagactgtcttttaaaattatattttcctttccaaaaagtaaatactatttgtaagatgagatatttgaggttcacaaaaataactgtcctggagttgccaggcagaatgagtagaatacatgagtttgagttctaaaatgtggcagtggtgtcttacgctggagaaagaggaatcctctccattttatctgtggtcagatgaagctttgtgctcatcaacatctacacttagaattttgaagtagatgtcggctgggcacagtggctcacgcctgtaatttgagcactttgggaggccaaggtgggcgaatcatatgaggtcaggagtttagagaccagcctggccaacatgatgaaaccccgtgtctactaaaaatacaaaaattagccagtaattccagctactcaggaggctgaggcacaagaattgcttgagcccaggaagcggaggttgcagtgaactgagatcatgccactgcacttcagcctgggcacagagtgagactccgtctcaaaaaaaaaaaaagaaaaaaaaaaagaagtagatgtcaacacagaagatcatgtgttacaatcctcttattttaaaaatgaggaggctagccaggtcctttggcacatgcctgtactcccagctacttgggaggctggggtgggaggatctcttgaggtcagaagttatagctgtagtgagctatgattgcacctgtgactagccactgcactccagcctaggtaacatagggagaccctgtcttttaaaaaacaaaccaacaaatgaggaaaccgagttgaaagatctgtgttatatgtttgagtcagagaggtaggtagtggtggagcctaaattggaacctcagacctgggctttttagttacataaaatccaaaccaactgtcagccttcctagatctcattccctgcttaataaatacacaaacccactaattcttatattgatagtaggcataatcactactagagctacatggtggttaactctagaggttaacagaaatggataaattaagtgggacatttccaggaatgctaaactgcttctggattaagaaattgtatcttgtgttccttgtggctcgttatgcccttgaatccctgtaacagtaaaggtttcttgttctgcacatgctgacttacctgtcctacagtctcttacagtacatcaatcagaggaagaagttcagaaggcgctgggtgggagctcttgcctctgtaactatccccagtgagtatttttgtattattgataggaaactgaaggactatagggttaaagtaatcgcaactcctttatacaattagggttaccagatttagcaaataaaaatataagatacccagttaaatttgaattttagataaacaacaaatgcttttttagtatttaagtatatgttgtacaatatttgggacctacttacaccaaaaaaaaatcatttttcacctgaaattcaaattttctgggtatcctttattttactggcaactgtactcatgacatctggaacagtgatgtgtgtgtgtagagtgaagtatataaaaagctgagacattactgtaaaggtagttggtattactgatttctgtggtgtgcattgtcagtgactgccacattacatgctgaattgctcggacagaaggctgtttggattactaatcaagaggctataggtggtttgtgcttatttgtcttttcattcttacagatttaaaaaaaaattatggtgtttcacacatagtgattagtgctcaggaaattattggttgatttcaaatgtcaagggtctgttataactgaagagagacttaaagaatgatagtatcctggacttagaggatgttgaaagttgggcatatcccatttggtccagggtgcaggagagctggatgagggaccaaatggttgtctgtaggaggagatgtgtccaatgaatgaactggtacgtgcctagcagttttttagaggttacctaataaaacaagctaggttttgtatcacacaaaaaattatttatagaaaatattttcttgggctgggtgaggatgctcacgtctgtaatcctagctttttgggaggctgaggtgggaggactggttgagcccaggagtttggcaccactctgggcaacatagtgagaaaaatttttctctacagataatttaaaagttagccaagtgtggtgttgcacacctgtatgtagtctcagctactgaggacactgaggtgggaggatcgcttgggccaacgagtttgaggttacagtgagctatgactgcaccactgcactccagcctgagcaagggagagagagaccttgcctattataataaaaaaaggaagaagaaaacatttcttttcggagaggagttaattttagggtgggagtagaacagatgtgagagctgttaagtatttcattccttttctcttttctagttcattttatctatgggccattggatcctgtaaatccctatccagagtttttggagctgtacaggtgagtctccccgagagaagtctatgttttgttagtatctcatcctgacagtggtaaacagaattgcctgttgagggctattggctctagccattgtctttaacctcgctggctgttcatccaggaaacaataaaaagattgagttgaggaatcttattctaacataattgtagtatcaagacattcagttatacgttctcttgatttatacatagtctgttttcactgtcatgactgctacatattccttggtgtacaaaaagctctcatgtgagtcaaaggttgaaagtggatatacctacaaagtgtttgtttgttttagtctgattgtaaagccaattcattggtttaggctgagcagatggcaaggagagattgagaagagctcattgtggaaaagtgccttctcattggttgctattctctctaggtacttacttggaaggtatcagaatatgaaatcttgattatgtcacataagaatgttccataccttcctgtggcctactggatacaagctagtagtaaacagcttgcatataattttaaataaaataccccctctctcatctcctcctgggattaagggaagatccttggttatctctgcttgggcagtgagttgctgtgtgatccacttgtttgatgcttcatccttctctaaggagctgaaagtcatcttgctttgacaattgttgcaaaagtgttatattttcaagttgttgtttgttggattatgaacatttaaaaactagtttgtataaatggaattggcaagtttatctgcctaagatacaatttcagagtagaaggtgaataagctctttggtggctccttccagtgtggtgtgtccacagggtcatttactggggcttcccactggcttacatccctcccgctccagcctcaagttcacctgcgtgctgttctcttccactaggaaaacgctgccgcggtccacagtgtcgattctggatgaccacattagccactatccacagctagaggatcccatgggcttcttgaatgcatatatgggcttcatcaactccttctgagctggaaagagtagcttccctgtattacctcccctactcccttatgtgttgtgtattccacttaggaagaaatgcccaaaagaggtcctggccatcaaacataattctctcacaaagtccactttactcaaattggtgaacagtgtataggaagaagccagcaggagctctgactaaggttgacataatagtccacctcccattactttgatatctgatcaaatgtatagacttggctttgttttttgtgctattaggaaattctgatgagcattactattcactgatgcagaaagacgttcttttgcataaaagacttttttttaacactttggacttctctgaaatatttagaagtgctaatttctggcccacccccaacaggaattctatagtaaggaggaggagaaggggggctccttccctctcctcgaatgacgttatgggcacatgccttttaaaagttctttaagcaacacagagctgagtcctctttgtcatacctttggatttagtgtttcatcagctgtttttagttataaacattttgttaaaatagatattggtttaaatgatacagtattttaggtatgatttaagactatgatttacctatacattatatatattttataaagatactaaaccagcatacccttactctgccagagtagtgaagctaattaaacacatttggtttctgaataaattgaactaaatccaaactatttcctaaaatcacaggacattaaggaccaatagcatctgtgccagagatgtactgttattagctgggaagaccaattctaacagcaaataacagtctgagactcctcatacctcagtggttagaagcatgtctctcttgagctacagtagaggggaagggattgttgtgtagtcaagtcaccatgctgaatgtacactgattcctttatgatgactgcttaactccccactgcctgtcccagagaggctttccaatgtagctcagtaattcctgttactttacagacaggaaagttccagaaactttaagaacaaactctgaaagacctatgagcaaatggtgctgaatactttttttttaaagccacatttcattgtcttagtcaaagcaggattattaagtgattatttaaaattcgtttttttaaattagcaacttcaagtataacaactttgaaactggaataagtgtttattttctattaataaaaatgaattgtgacaaaagtggactctggcttcccctcccccctcccccccacccctctgggataaaaattttccagcattgccaggagctttcaggtacacattaaagaataaaatgaagttaagcagctggagtataggatagtatttgattttcaagatcacccaaagctgcactatcgtcccaaagctgaccaagtagaataaaaagaaaaaaaaaaaaaaacaacccatgcgcaaagatagacatttgcttgatctgctggctcagggccaaatgtttaatttgcttctccaaagtcattcatcttcaaaagtctgattctgggaaactgatgccactagcctaaaagcccactgaccatgtagtgtgcatcagtttcctcttgtccagtaagcatttatccaacagaagctaagataacatctacaggtgttctctctttacttctgacagtcacctgcatggtcactccatcggctaaggccagcctggacctcaccaataaatcatagccacctctgaatatacctgagagaaaaaagtaaggaaaaccatattaagaacccaaaacaagcactggataatgaaatttatcatgctatccctgcatctcctttctattagtttagtttagcttttccagagacttgtggaaactgaatcctaaacaaacataaattccaaatatatatatttttatattcccatgaaaccaggtacatagaaggtattcaaaaataccaatttggagtactcaaaaggaatgttggtggtggccttggtatctgttggagagatttgttttgggccaaatgtacatcttaaaagaataaccaagaatagcatgcaaaacaaattattcattttgactgggtatcaaattgttactcatataatgggatgatgggacaacagcaaggcataagatgcccatctatatcctattattaagctttgcaagaaaatggaaggaaaatctgatggaagcttcttacctgccagatagagcgaatgggaattcttgttctcaggtactttatcggacctctcacatggctgcatgcccagaaatgtgatgatattgttgacagcctctgtgttgagaagatgtatgagacagtattaggaaagtaaagcacagggatctccctctgcaccagtgtatgctgggagctggggtggaagggtttgttggtgaagggggttgttggtgatgtgtagagggaggctactactggactagaaaatggctgatcaattagatgatgaagacagggtgctggccttttaagtaagagatttatgaagtttttttttttttaaaggagttcttctggagtaacaaatatgcctgttaggtgttatactgttatcaggcaatatactgatagcaaaatgggtctcaccttcaagggttttggtagaactgagggcaaaggtttcctctttctcaaaggtatctcccacctcttcccaagcagcagcaaagttaggcttcagtactttctgaatatggtcagacacagtcacttcgagatcttccagctagtgggtaataagcagtcagtaaagaaaagtcctttctgttatagggcaaagataaaggaactagtcaatatggtcctccggagcctagagaaaactctaccaccaaaatagtttaagttctgtagtctggataaatctaatgttgtagcccttagcaaaggaaagcaagaaaacagaacatctggcaagagcctcagatcaacatctgtagccctgaggtacagagtagtcatgttgcacccacacttgaccactgagttctgggcacacggtaccctctgatcattcactaagaggttgatattttttaaaaaaagttttccctccattctgtgaaggctttttaatccatgatctggctataaactaacagctgctgaagcaaaaacaaaaaaccaaaaaacaaaaccaaccccctccccaaatcattttaaataaaactgatctcaatgaaaatcatgtcattattttcatctcttaattatccctattataaagaaaaaaaagggtgagtttgttttaatgatgaagtggtaaatctcaattctctctggcctggtgctgtccagttacagaggagggttagtccaggtcctcctaatttgtcatctgtttcagaagaatagaaatcccttaagtttatgtcagatgctcctagaaaaatgttctctcaaggcagaagtcacttagtgttgtgaaggtgtcaaagaaagtctctatgctgggaagactcaccacatactcatcatcatacccatcctcatctggaactccagtgttagggtcacagtcccggactgtaaacttcatggtgcagctaaaggagcctgcaactggaggagaagggaggcaaacctgcatcagtggggagtgcaagggagacgtttccatcattccatctgtactcagcactgtgttccacattttccagttaaacacacatgccctgttgtctggggtagtggttctcaaaagcagcctacaagcgggtcaggaaggcagtctcacaaagcatgaatgtaaagtctattccacgctgtgggttacagcagtacagaaatgataacatgggcagactgtttctctattggtatgaagaaagcagcagagaggtacttttgggggctttttgccatgcctatcaaaggggcctaaatgttgaaaaataaatattttgagaaccactgctgtaggacctgaccaaaaaaaaaaacaaaaaaaaaacctgtggtaaaaagcatacagatcatcagattaacattgaccaatctcatcagcatctcaatactatctttagattgtggactgatggcgggtccacagatcaccagagagaacttgctttatctgtcaaccttcagcctaaagtgagtaggtcagtaatgagtttctagtattggtaaagtcagtgtcttaaatggaaaagcaagtgggcagttgtatgttttcacacaagtggtgttaagtaataagaaatggaggtgggggtacatttttggaaagtgaagtctttataaaaagtaaagacagtattttctgaaatgtttgaaggaggggatttagcaagcagggatgaagaaaaggcatttaggatcttgtctatggtctggaaaaagcttataggtacaaaaaatattagatattgggagagttaaaaagttatttgggggataggcaaggagaggaaagaacaggctcagatgtgaagaccatatacgacagattgggtaataagactttcatctgctcagtcttgactttaaattccatccattcatccatccacacatgtagtgactgtcaatacatgttgacattacacgtaaaggtataagcttatgtgccagacacttggataaaaagatgactgagacatgatctctgtctctaggagctgtctaggagttaaataagtgtgtgggctgtgtgtgtgtgtgatctatctatgactttacaactcaatgccatagatcctttaagttttaagagagtgccatgtgagggtgcgggattaacaaatagcctgggaaaactgtaaaaaatgtgaaacgatataatagtttaactggctctcaaaagatgcaaaagagctttggcaagcagaggaagatgtacaaacaggcaaaaggaaagaggccagaaagtccaccgggcagctggaaacagtaagaggcatgctaatgcctaggtgctgagaagataatttgtttaggaataaattgtaaaataccttgtatttcaaatgattttcca

SEQ ID NO: 844 - DNA, 3298 bp, Homo sapiens
ttgtttttgagatgaagtctcgctctgtcacccaggctggagtgcagtgacgccatctcatctcactgcaacttctgcctccgggactcaagctattctcctgcctcagcctcccaagtagctgggactacaggcacacaccactacacatggctaatttttgtatttttggtagagacggggtttcaccatgttggccaggctggtctcgaactcctgacctgaagtgatccgcctgcttcagcctcaaagtgctgggattacaggcatgagccactgcgcccggccacattggttaatttggttgagagcgggctcgatgtgattttattgatgataatgtcttcaatttgccttgccctcagtacaaagcagcatgttgtaccaagggttctgggctgagggacataactagggaagactgagctgtgaatttgtcccctcagtagaggatcaccctggccaagttccagttcatcttggagccttattttacatcagatgggaaaagaccttgcaggtcattcattgtcttacatgcagagctcgcatacctgccacagggttacccagcccccagtggacagagaatttgtcccataccaaaatggctgagccacccaatccctctagacagcccctatgttggaaaattctttatgttgaatcgacatctgtttctctacaatttgcactcattggagccatacagaataaaatgtctaatgctgcttccacaaatatttgaggactgctaacacatttccttcttctacttactccacaaggcttcttttcttcaaaccaaacatgcccatctatttcaaacagggaggcagtgtggagtagtggaaagaaggccaactttggagccaggcacatctgcgttcagttcccagccccttcacatcctaacacttagcgttccgagctgccgtatctctctctgaaatctgtgagtgaaaatactcatctagccaggctactgtgaggatcagggatatgttgggtgaagatccatgctcatggtaggagcttaaaatacgagaactgttacaccttcagtttgcaattcatttagttgaccttctctgaacacattcctatttgtctctgtttcaatatgtatctgctctgtagaacagaataaaatgctttctgtgagttctaaccagcataatagagtaggattagcttatttttggtacttcccctcagtctgcagtcacagtagcctttttaagggtcctgtcttactgattcagtaagtttctcaaccaaaaccccttcgttaacatgtgctcctgttcaaccaagtttctcccattatgaagtgttttagttgatttgaatctacaatgatggctcttgaaagtggcagtcccggttgtgtcttgttgtctccataaatatcctgcacttgtcatattatgggtctcaaactggggttagaaaaatatggttcttgaatctgtggtaccatctctgctgatcccataccactgttgtgaatcagcgagataataaatgcagagctttctacatgaatttttgcacagatctgaggtcttatcatgaggcggaactgtgttagacttggaatgtgacaagaatgtgtgataagccactggctgagggagtactactgcatgagatatcctgcacagtccaggatagcatctgtccagaggaactgaaagggtgcaacttcgagcaagccagagccgactttgaatttatgtgtggctgtgtgttttctcagggctccaagtgttttataccttgggtcaaattctccccctgcggaggaagctcctttctggaagtaaatcaggcacatttagaagattcgttaactctttggctcctgggggattatggccagcattttctctcttagacttcccacagcgaattcctggttgggccaagctgatatctttgagctgacttctgtactcagggttcttccaaacaggaatatgctttctctgcctaagatctgggttccatgcccatctcaacctcaatccctccttcaaggaagtttttcctaactcctcggccagacatcaataatgtctgaagggaggatttctcccgagtgccagacttggaattcctgttgtcttcaggagctctccctggcgctccctccttcccccagggcctttaaactgtttctcctccagtctgcccacttgatccatgtgggtagacatgttccatggccttcagaataagatcttttgtggggtactcagtccataaacagaaaattgccttcatcttggatgctggtgtttctggcctggtgagaatgaaagtgtggaatttgtttgtaggactcaaagtttccattaacaataaatatgaaaaatatataatgcaaaggcttttgttattgttattattaaaataggaaagcctttacctttttggaagaaccgatttagattttgcagagtaattcagtctttaaaaggtagtggtagttaaaataggtaatctttgacttgtaaagagactaatttaaattttgttaagtaaccaattaaggccataaagagtttaaatccatctgtggcttctcattttctctagaacaaattcctaattccctacgatgaaattctcttgctatcctaattttttgccggctcaaaggactaaccgttttccccaaacacgcggccctgagcctccggtgctttgcgaaagccgtcccctccggctggaatgttctttgtctctctggtaaatgtctattcatcattcaagaccacccttcgcccctccccttaattacttcctcccctgtgcgccctcaaattcttgtactcattcaagcagtatttattaggggccagctttgtggccggcaccgtggcgggctctggggctacaaaaggtgaataatacttgggctctgcctctgagggccttacacgttagggaggagtgggtcaactgccacaaacgtcgctaggaaattaaaaggaaaattttacaaagtggcagttcttgtctgtcttcccctccagatggcccgtgtgttgttttcgggccggggctatttctcatttatttcgcacccccggttcttagtgccctgtaggtgctaaatcagcatttgtttcatgagtgctttttctgggggcaaccagacccctgcagaagtgtacctgtgttgtgccagaggttctgatgataggcttataggcggtagtttcctcagtgtccgtgggtcgcccccggtcccgggttggatgccccgcggtccagcaccgaacctttc

SEQ ID NO: 845 - DNA, 906 bp, Homo sapiens
agacaaagcaaggcaaataccaaagagaatcaggaaagaatgccctgaagatctgcattaaaactgttctctgaaattaagcttgtcttgtgaggattcactgaaaatgagagtcaaccactaaggagatttgtatgaaaagaacccagcgaattagagaaaagatagatgctggcagctaagacaggagagggacatgtgagttgggccagggtacagaaaatgcagtgtggcaaagggcagagtgggaaaggtgggagggagctgccaggtctcaaccacctgggggagaccatgacaaagtaagagacacttatgaggtatttccagaaagctttgttagaataataattaaagaaaagggtatgtcactagggcaaaagattagaaagaaggcaaaagagatggatctgtacaggctaactgcagcagtctatgcaggtctggactgaactgagaagcaatgggtgcagcatagtgtgtaggacatcgaggaaagctgggcagtgagtgccaaaataagcaatacacacctacctggaaaatcgtgttgagtctgtgggaatgctgtacaaatggtgggagggagtttttctctaggacaaattcagaaagggaaggaggaatggtactggaaagcaacattagagttgtcctcagatgaaaaggagttggtcactaaggaatgacacacatcaacaggaaggtaagacagcattgctgggccaaaagtcataagagagtatgaaataagagactggaagcaaaggaaagaaaatattacataaggaagggcctactggcagagcaggtgtggaataaagatttagaatggggtatcctgtctaggtctaaatggtcggctgcatgggaaatacacagaaagggttaaggagcaaggaattc

SEQ ID NO: 846 - DNA, 778 bp, Homo sapiens
ttcattctgcaaacgagtatttattgtgcacctgtgatgggccaagcagtattttgggtgccaaggatacaacagggaaaaacatttcctcttttcttggagcttgcattcttgtgggagagacaaatgaataattaatgccaaggagtgggaaatatgagtaagaaaaaaaaaaaagaggggttggagaagggaaggcctcctgaggtgacatttcagccaagacctgaatgatggagcaagccacacgggcctgagggcagcagcaggatggacaggaccaaaggtccgtgcaaaggccctgaggctgagtggtgtttgaggaatgttgagaggccagtgaggaggggaagcgtaagaggaattaagatccagcagctcctgggagatcagaccatgtgggcccctcacaggtaaggcttcagcttacacacctaggtaggtgggacactctgcacagtttggatcagcaatccaacacgatctgctcagctctgaaaaatctctggctattgagtggagaacaggctacagggagaagagggtgggagcagggataattaggagcctattgcaatatccagacaagagataatcgcagtagaggaaggggcaaggcactgtcaggataagcctggaggatttgctcatggattagatggtgggtacaagagaaacaggaatcgaggaggattccccagttttcggcctcggaactgaagaaccgagtttgcatttactaggagggaagtctccccaggggagcacatttcacacc

SEQ ID NO: 847 - DNA, 778 bp, Homo sapiens; identical to SEQ ID NO: 846

SEQ ID NO: 848 - DNA, 745 bp, Homo sapiens
ttatttgcatccaatgctactgataggactgggcaacccaggtcactggcaactgtggaaaggaaacttttggtgggattgtgaggaaaaaactggaagggagtgggcagaagtggagacggggaacacacacagctctttggaagagttttgctctaaggggagcagagacaaggcatggcagctgaagagaatctggaagtctctggtctttgatattgagctatacccacttgggatgcatgtaagtgggtggaaagtcctggcagaggggagaacccgcagtgcaggagagagggcgactgtaggagaaaagccctcaaggagtgaagagggatgggccccgaggatgggagcagggtggggcatttattgccacagaaggggaggctgaggatatggtgtcagatgcagacgggctgagagttcacccttcaccctctctcctagctctaagccagaacctaagggggccagaagctgggatccaagtctacttgtcccaccccctccactggaactccctggcccccagctctgcacagctcctgccctgcagccctcgcctggctgtgctccgggaagtcctcgtgggcacttcaccctgctctgcagccacactcacaccctagatccaggtcacactaggtatgatttgcttctcctggcctttcctctcaccagccccgctatcacctcatttagaaggcaggtatgattttcattttctaggctcagagagttt

SEQ ID NO: 849 - DNA, 745 bp, Homo sapiens; identical to SEQ ID NO: 848

SEQ ID NO: 850 - DNA, 387 bp, Homo sapiens
tgtttttttggtggagggtggagggtggacttggggaggaagaaaggtaaggaagaggctagggagatgagggcaggaatgacttgatcagatttacatgagaaagaattacttcaggtgccatgtggagaaaagattggagggagaactaaagtggatgtgggtaaatgagtttcgaaagttattaaagtgattcaaatgagctgttgcaaaaactttgcatattatggtggtggcagatgtggagaaaagtggttagatttgagggatatttatgaggcaaaattgacagtagttgatgatggactagataggggagagaattgaggtataaagggtgagtcctagatttctgactatgcgtctgaaaggatggtgatagtgttc

SEQ ID NO: 851 - DNA, 904 bp, Homo sapiens
ggtggagggtggagttggggaggaagggaggtaaggaagcggctagggagaggagggcaagaatgacctgatcagatttacatgggaaagaattacttcaggtgccatgtggagaaaagactggagggagaactagagtggatgtgggtaaatgagtttcaaatttattaaagagattcaaataagctcttgcaaaaactgcatattatggtagtggccgatgtggagaaaagtggttagatttgagagatatttatgaggcaaaattgacagtagttgatgatggactagataggggagagaattgaggtataaagggtgagtcctagatttctgactatgagtctgaaacgatggtgatagcgttcacttaaatagagaaaaagcaaaaaggaccacatttattgaggggaaatagcgagttgatttgggacatattaagttttgagttgtcattgaatatccaagagaccatcggagatactggtatggagctcagagaagaggtctaagctgagatgtaaatttgagggttatttcgatctaggtagtaatctaagctgtgggagtagaagagttatcctcaggagtgaacagtggatgagaagaagaatgtgtaggtaggtccaagtcttgaggaacgctaacatgtatttaatgactgagtagaggtagatgaaggtgcataggagactggaaagaaataatcaggaagtcgggaagagaaagtttcctagaaacagacagtgtggacaataatgtcaattactgtcggagaggtcaagtaagatgaggactaaaaatgttcgatgaatttaatcacatggaagacactgtgaaccttagagctgtattagggaagtggcagtgctggaaaccagactgaaatggattggagcaggtg

SEQ ID NO: 852 - DNA, 904 bp, Homo sapiens; identical to SEQ ID NO: 851

SEQ ID NO: 853 - DNA, 904 bp, Homo sapiens; identical to SEQ ID NO: 851

SEQ ID NO: 854 - DNA, 387 bp, Homo sapiens
tgtgacttttactactcttcatccattaaataaaaagttattaagcatttattaagcatcaagcactataatagacacctgggatacagcggtgaccaaaagcagtcatgatctctctattgacagatattacaatctattagaaatggcaatcaaaaacattactcaaaataactctaaaattgcaacagtgataaaatctgtgaaggacaggcacaggtaccttgacagccagaacaagagtttgactttatcaggggaatgagaaaaatgagtcaaaacctgaaggatgttaaattaactggattaagagggggaaggaaatgcattccaagcagagagagagagagtagcatgtagcaggaaggagcatgggaaggagaaaat

SEQ ID NO: 855 - DNA, 387 bp, Homo sapiens; identical to SEQ ID NO: 854

SEQ ID NO: 856 - DNA, 387 bp, Homo sapiens; identical to SEQ ID NO: 854

SEQ ID NO: 857 - DNA, 181 bp, Homo sapiens
gtcaagcgctcaccaaaaggcagaagctgtgccattttgatatgttatttaaattttatgcgttcttttaaaatttcagtttcaacaatttgctggaatatacgctgaataaacttcgctccccgttttttccggtgacggccgctgttggctggagcttcacggaaaacccggagaagcg

SEQ ID NO: 858 - DNA, 389 bp, Homo sapiens
aggtgggggccgccctccgacggcgttagagacgttgtgcagcgtggccctgccagctacgtgaaagcagccgcggggcttgcagggctgtggaccttgtagggatgaccctctaaggtcatgctcgtcttcctccccgataagaccatacccaaatcctgttgccgtttcagagactcaatatgacggtttcattcattcattaacatcttcagtttatccataaacagatatacacgtgtctacagcactgccgagttagtagatacggcagtgaccaagagggacttgcacggtcctgactccatgttctagtgatgggggagaaacaatacgctccctatccatgagttccgcatgtgtgaattcaaccaactgcggatagaaaa

SEQ ID NO: 859 - DNA, 844 bp, Homo sapiens
cttgtttatccattcactcatacgttgtttccttttggggatattatgactagcattctacgaatatttttctggaagacttttgtcttgttgtagaagatgttttttttctcttattttgagtaaaaagtgagaggaattgcaggaacacatataagcacatgcttattttttttaaagaaactgttcaactattttccttagttgagaattttatactcccaaaagcagtgatgtaccagagccccacttgtttcacatcttcagcatcacttgcaactaatcaatcttcaattttagctgttcttctggctttgtaatgacatctcattgtgcttttgctttgtttctatctgatggatatagatgtgaaacatcttttcttatgcttactggtcattggtattttttctattttgaaatgtttaagtcttttgccaatttttattgggtttatctctcattgacttgtaagaattcttatattcataggtggaaattgaacaatgagaacacatggacacaggaaggggaacatcacacaccggggcctgttgtggggtggggtgagcggggagggatagcattaggagatatacctgatgttaaatgacgagttaatgggtgcagcacaccaacacggcacatgtatacatgtgtaactaagctgtacgttgtgcacatgtaccctaaaacttaaagtacaataaatataaaaagatacatatcctatgtattttcaatattttctcccagtttatatcttactttgatttttaaaatgttgaatttcaatgaatctcagcttattaatttatttccatcttatcaaataaatatttcc

SEQ ID NO: 860 - DNA, 844 bp, Homo sapiens; identical to SEQ ID NO: 859

SEQ ID NO: 861 - DNA, 2843 bp, Homo sapiens
cccaggcctacttgtgggacaacaaccaggtggttgtgcagtggctggaacagcactggcaggcaggggatggcccgcgctccaccatccgtgagaacatcacgtacctgaagcacgactctgtcctcaagaccatccgagggtgagtggccaccgcacctgcttcccagcctcctggcaaggacccgagcctggattgacccctagctacccgactcctatgcagccacttgaacccgccaccctgtgcagtctggggttgtccccgccccctccccgctccccagcaaagagaccacactccctaatgtcgggtctcccagcacagtggctggggtgggacagagagcctagaggtactctgaaggccgtgtgagatgcttccaactcatgaaccttgctggaatatggacttgtccaaagtcacagctggagcagggttggtcacagaacccacatttggaaccgctagccttcaggctgctgtcttccacgccagtgttgacctttccagagggtcccctcccccaattgccatggggtcaccccgtgaaggagggagtcgagcacaggggaccccattttggggatgaagctgagactcaaggcagtgtcttgtctcaggtcatgtcacaaagcagtgaccagtagggacggtggtgcctcaaggcattctgaacttcaggtcacagcccctcctgctgcacaggaccatcacccccatggggaccacagcagggactcgggagctctgggttctggggtgtggccccacacaaggactctgccacccttggggccactgaaaaagtggctggagtgatcccagccctcctctcacctcccccacagcctggttgaagaaaaccccgaggtggccgtggactgtgtgatatacctgagccagcacatcagcccagctgagcgggcgcaggtcgttcacctgctgtctaccatggacagcccggcctccacctgaccgtggcccgcccagccactcccgggaccacggcaaaaggaaccacccagacccaccacccgtacaccctcagcagaccctgaagacttgcttttaaacaaagaaaatcctgggcacttctgcagggctgctggttccgagctgacacccgtcttaacaaaaggcccaggagtgcctcttccaaacaaaaacagcctcctctccatagctgggaagtttattttgttttgtctctgaagacagcagttttattgcatcactaaatctaatcaagctaaaacatccctgtttccttttgcaaaacagtgcctggcatgtgggatccaggcgttctttaggatccttggataccacatcgtgaaatcttttatttttttactctgagaccagcaccagatgtaagtaagcatctcatatatttcagccaaataaatgggccaagggaaaaaaatatatatatatagacaggactagagaaaacctatttttgtaatgatgtttctttggatactgtctagtcacccagaaaaatgtatggatgaatttttttttttttttttgagacaaagtctcactgtgtcatgcaggctggagtgcagtggcatgatctcactgcaacctccatctcctgtctcagcctcctagataactgggattacaggtgcccaccaccatgcccggctaatttttgtatttttggtagagacagagtttcaccaggttggtcaggctggtctcaaactcttgacttcaggtaatccacccaccttggcctcccaaagtgctgggattacaggcatgagccaccatcttcagccagatgatttttttattgagagagtgaaatgctattttgttccccaaatggcgctagtgaatcactaggagggtcccactgataggccatgtttagcactggttgccagggattctctttttgagagagggaaagcaaaatgaatggaagtacccagctggaggtttcagggcttctggaggatgctctcgcatagctcgaggtcctctgcccacctcttctctccaaggaaaatgaggactgccccttccccctgcaggattggcccccagcctgcgcatgcaccctcctcttgcccaagtggggagcacagaggcggagaggaatcccttaccacacccacggcccagcttgctcacgagtgtcacctctgtgacggtcaccactgctcccttggagggccacttgagttactgttgcttcctcgcctgctggcttgatgagcaccgatggtgggatctgaccccgaggggcagagctgtcggtgactgaggactggactgtggtgaccatgccgatttgctcagggagaacgttgcaatgcacccagcagctcctggctctgcaggcggcacagcctggggccctgtgatcctctggtttcttccattggggcggagtcggggatggagggagctggccacaacccactgctctgatgggtggtttgtccaaggatgctgaatgtaatgcctggtcaatgtggaagcccatgaggttgcccagggaagcctccaaaagctgggatgcttgagggtatccaagttgaaaaagacaaaatctgaccatcagccagtgacagtcctggcaaatgaaggtggggcggggcagtgaggggtgggagaaggtgaatgattcattattccaccccgaggtttgctggggtgaggggaagaatcgatgctgctttgggaactgaaggtttttctgttgggaaggccctcttggttttggagagaaagacaagttatgagtagctgctaccctggaacggtgggcagagagcctactaggaaatgtgcagaataaactattttttgaaggaaa

SEQ ID NO: 862 - DNA, 180 bp, Homo sapiens
gacatcctggagtggaagaccgcacgcaccttcctgtattggcgtctgcgccgcctcctcctggaggaccaggtcaagcaggagatcctgcaggccagcggggagctgagtcacgtgcatatccagtccatgctgcgtcgctggttcgtggagacggagggggctgtcaaggtgggcctg

SEQ ID NO: 863 - DNA, 624 bp, Homo sapiens
gggaactgagccaacttggtacttggcagcagcccttctcaaggctgatgggaggttctgtaatcctctttgcaagctttgtcaccaggtcacacttttggcagccaatcaatagatttatctcattaaactggcagaagagtgtttgaatgcatgctccaacagctacctggaaatagcaattgtgagagatgctaaggtaaggatattccagttcctataaccgtctgattttttgtccttgtgaattttcaatctgctgttttactgggatagctaagttccaggtttattttctcaggtaggctcacccacgacctctgtcctgtggtttgcattcctgaacatctgttagtctttcaaatgcaaggcacaaaactaacctcaagagtgtggctagatctgggagtgaacacagggcctgtccctcacagacgagaggtcaggagcacctttgtttcccaaggcaggttcttgattgatttaccttcatgcgttgatgtctttgctatgtgtgtaaaatgcatgtgttgctgaatcacatgtgaagctctacatgctggggtttatactgtgtttggcatgttgtgggagctcaataaatactaaatcagttgcacagtc

SEQ ID NO: 864 - DNA, 363 bp, Homo sapiens
ggggaacttttttttttttttgtaattgatgtctgggctctcctcccaagagtctagttgatttgagatggtgcctggacactagcattttccaaagcacttcaggggattttaatgtgcaaccaagattaagcaccttaagaattatcctttctagggctgggcatggtggcttacacctgtaatcccagcattttgggggaccgaggcaggcagatcacaaggtcaggagtttgagaccagcctggccaacgtgttgaaaccctgtctctacttaaaatacaaaaattagccaggcgtggtggcgcacgcctgtaatcccagctactcgggaggctgaggcaggagaattgcttgaaccca

SEQ ID NO: 865 - DNA, 1172 bp, Homo sapiens
cacaggggccatgctaattttccctgtattgttctaattttagtatatgtgctgccgaagtgagcactaaaagactttctttagacaagtgtagttttttaaagattgagctcactggctcaactcttgatgtgtgaatatagttgagtttacaaaaaatgtttattaatcatatatgaccattgggggctaacagtataaacttattcttgttaaacttgtttgggttaaatagtaagtgaattgtaaacaatttagaagttttttgttcagcacacaagaacacttctgttacagattctctctgacagaaattgttattttggggtttatagattatagagggaaaagttagatcacttggaaaaacctaactctcatgttcagtaacttgagtatagaatttataccacaatttatcttcaataaggaacctacatgaacttaatcagttatctgtagtttttgcaaggcattagaaaaaatttcacaattacagaggactgaaaatgtgatttcaaccggctagtctagttgttgaatgtccagtcacattacacatagtcctttgtgaacttatttgtgaagggagttcactttttatgtacatacgtgtatatttccttgtgtaatataaagcagatggttattagtattttagttctttcaagtttaaattattcaattgctagacatcacagaaattagtatatttaagaatttattataaagctcctctacaacttttaaaggtgagagggtctattatgatttttttataaaatcaaacagcatgatttagaacgtcagtcttctacttaaaatgtgtctatattcatggtatttccattcagtgtagatggtaaggaaaacatctagtcattaaagatttacttatagcagactccagaacactacctacaatggggtttcagtgactagaaatcttgaaggtttatgattgcatcaaattgagcctgtactaatatctaaatatctgctcttatgttctgctttatcccttgggattaccttctaaggtttggtcacaccagcaaactgaaacagatcttaatgtacataaaaaatttatactaatattactcatctgtgttacagtattttgaaaaatgtttcaggtgtcatctagtcgtctttcatgggtgtgatta

SEQ ID NO: 866 - DNA, 2243 bp, Homo sapiens
cacaggggccatgctaattttccctgtattgttctaattttagtatatgtgctgccgaagtgagcactaaaagactttctttagacaagtgtagttttttaaagattgagctcactggctcaactcttgatgtgtgaatatagttgagtttacaaaaaatgtttattaatcatatatgaccattgggggctaacagtataaacttattcttgttaaacttgtttgggttaaatagtaagtgaattgtaaacaatttagaagttttttgttcagcacacaagaacacttctgttacagattctctctgacagaaattgttattttggggtttatagattatagagggaaaagttagatcacttggaaaaacctaactctcatgttcagtaacttgagtatagaatttataccacaatttatcttcaataaggaacctacatgaacttaatcagttatctgtagtttttgcaaggcattagaaaaaatttcacaattacagaggactgaaaatgtgatttcaaccggctagtctagttgttgaatgtccagtcacattacacatagtcctttgtgaacttatttgtgaagggagttcactttttatgtacatacgtgtatatttccttgtgtaatataaagcagatggttattagtattttagttctttcaagtttaaattattcaattgctagacatcacagaaattagtatatttaagaatttattataaagctcctctacaacttttaaaggtgagagggtctattatgatttttttataaaatcaaacagcatgatttagaacgtcagtcttctacttaaaatgtgtctatattcatggtatttccattcagtgtagatggtaaggaaaacatctagtcattaaagatttacttatagcagactccagaacactacctacaatggggtttcagtgactagaaatcttgaaggtttatgattgcatcaaattgagcctgtactaatatctaaatatctgctcttatgttctgctttatcccttgggattaccttctaaggtttggtcacaccagcaaactgaaacagatcttaatgtacataaaaaatttatactaatattactcatctgtgttacagtattttgaaaaatgtttcaggtgtcatctagtcgtctttcatgggtgtgattagttacaaatgttatgcttatgttttcatacttaatatcaagctttctttgtaccttacaagatagtatttttggttctaaaaaaaacaagcaaacttcatttttgtagtatccagaaattacctggagtcagtatttttattcgccttctagaacttgtgatccacacatcacccatttatattagtggtaaaattatctgctaaaatctaattgtaagaaaggcttaccttctgtcatcaagtgattgtatcatcctggatcgtcatttccaaggaactagcctttcttttcctaagcgtctgtatgtgttctaaaacttccagtatatatttatagaacttagaaaaaatgttacattattcagagtagcaagtcttactggagtacctatgtttgttttcttggtttttatttttttttaagtttaaaagtagtaattaaacctatattttgtgattgtttcctggtctgtgtttttaaattcctttccttcagttttcctcatgaagatgtttcagatactgaatttgtttagacattgaatgactttgttaaaggcacaattaatcacattggttgtactctgaagacagacttctttaaaaaaaaaataaacaatttaaaacaatgtggtgattatagattaatgtaatatacgccatccttaaaaccacaacatataacagatcacaaaagtgctttcaccaagttacaaccgtaaatccttacctttttacatcatctaagtaactgcaaataaatttctcctcagggaatcagtgcagtcttctttttccttttaaaacttagctggagttacttaaactaattcttaatactattctgaaagtataaatatattgtttagaatacagaaaatgctaagagagtacaaagactttagtatatttttttcattttcatgattcaagtagaaaatagtgccaagtaggtattattatacatggtaaatgagatgaaaaaaatgtttagaatgtgaattcactagacctttgctgtactggatttcacaggtgaaaagatttctctaagatttctgaacttttag

SEQ ID NO: 867 - DNA, 20530 bp, Homo sapiens
cacaggggccatgctaattttccctgtattgttctaattttagtatatgtgctgccgaagtgagcactaaaagactttctttagacaagtgtagttttttaaagattgagctcactggctcaactcttgatgtgtgaatatagttgagtttacaaaaaatgtttattaatcatatatgaccattgggggctaacagtataaacttattcttgttaaacttgtttgggttaaatagtaagtgaattgtaaacaatttagaagttttttgttcagcacacaagaacacttctgttacagattctctctgacagaaattgttattttggggtttatagattatagagggaaaagttagatcacttggaaaaacctaactctcatgttcagtaactgagtatagaatttataccacaatttatcttcaataaggaacctacatgaacttaatcagttatctgtagtttttgcaaggcattagaaaaaatttcacaattacagaggactgaaaatgtgatttcaaccggctagtctagttgttgaatgtccagtcacattacacatagtcctttgtgaacttatttgtgaagggagttcactttttatgtacatacgtgtatatttccttgtgtaatataaagcagatggttattagtattttagttctttcaagtttaaattattcaattgctagacatcacagaaattagtatatttaagaatttattataaagctcctctacaacttttaaaggtgagagggtctattatgatttttttataaaatcaaacagcatgatttagaacgtcagtcttctacttaaaatgtgtctatattcatggtatttccattcagtgtagatggtaaggaaaacatctagtcattaaagatttacttatagcagactccagaacactacctacaatggggtttcagtgactagaaatcttgaaggtttatgattgcatcaaattgagcctgtactaatatctaaatatctgctcttatgttctgctttatcccttgggattaccttctaaggtttggtcacaccagcaaactgaaacagatcttaatgtacataaaaaatttatactaatattactcatctgtgttacagtattttgaaaaatgtttcaggtgtcatctagtcgtctttcatgggtgtgattagttacaaatgttatgcttatgttttcatacttaatatcaagctttctttgtaccttacaagatagtatttttggttctaaaaaaaacaagcaaacttcatttttgtagtatccagaaattacctggagtcagtatttttattcgccttctagaacttgtgatccacacatcacccatttatattagtggtaaaattatctgctaaaatctaattgtaagaaaggcttaccttctgtcatcaagtgattgtatcatcctggatcgtcatttccaaggaactagcctttcttttcctaagcgtctgtatgtgttctaaaacttccagtatatatttatagaacttagaaaaaatgttacattattcagagtagcaagtcttactggagtacctatgtttgttttcttggtttttatttttttttaagtttaaaagtagtaattaaacctatattttgtgattgtttcctggtctgtgtttttaaattcctttccttcagttttcctcatgaagatgtttcagatactgaatttgtttagacattgaatgactttgttaaaggcacaattaatcacattggttgtactctgaagacagacttctttaaaaaaaaaataaacaatttaaaacaatgtggtgattatagattaatgtaatatacgccatccttaaaaccacaacatataacagatcacaaaagtgctttcaccaagttacaaccgtaaatccttacctttttacatcatctaagtaactgcaaataaatttctcctcagggaatcagtgcagtcttctttttccttttaaaacttagctggagttacttaaactaattcttaatactattctgaaagtataaatatattgtttagaatacagaaaatgctaagagagtacaaagactttagtatatttttttcattttcatgattcaagtagaaaatagtgccaagtaggtattattatacatggtaaatgagatgaaaaaaatgtttagaatgtgaattcactagacctttgctgtactggatttcacaggtgaaaagatttctctaagatttctgaacttttagtgtcttctcacatacttctagtgtaaacaaacactataaacttaacatctgtattaatgctacctaccttttttaggattaatgattaacgagattttgaagatacttcagttaaattctcagacacataattgtgtattaacctttttgaaaggcattttcaatgaacactggtggttttttcaggaaattgctgaatacccactcacaaatgcagatattgatgaagtaggatatttgtatatttgctttttttcaatcattcagttttatgaacatggggtcaaagcgtatttcaaaataaagaccatttataaaactggaccactttaatgtttacaatttaataaatctcttcattgcagacatgtatggctgtttggtagtattcagaaacatcacagtaatggcagtttcttcaattggtgtgtagtcctcaataattatatatgaaattgctgtcaaaccagtaagactgcatttatacatccatcattttcaggattgttggtaacctgggcatattttcctaaggaaaacaaaaccaaaaaagggaaaagggagggttgttagctaataaaaattaattttaaagaatataacttttgccttttttttctttttgtcttaatacagggtttcactcttattccccaggctgcagtgtggtggcgtgatctggctcactgcaacctctgcctcctgggctcaagcgattctcctcactcagtcttccgggtagctgggaccacaggcacacgccactgcctggctaatttttttgtttttgtattttgtagagatgtggttttgccatgttgcccaggctgggctcgaactcctgagctcaaatgatccgcctgccttggcctcccaaagtgctgtgattataggtgtgagccactgcgcccagccatgcctaaaatatttctaattaccactttcaataaataagaaatgaaccataaaggataaatgagattttacaaaattcaatcatttaaggacaaatttgagttctgaatacaattttcatacaaatagtgtttttgcaaataatggccagctccatgttattagtacattgcattaacaggcttttgtggattgacctgagcattgtcactttttcacataattcttcctggaaaatgtatcaagtttcaaatgagtttcaagtcaaggtaacaacatattttaaaactgaggtcagctgacatgaagtataaaccaatgactgaagaagttgtagcgtgtattcttccctttcaaagaaattggatctgggtactaaaggtagaaaactaagcaaatgagggcgtttaaaattactgcatgacacatttctgttttaattattactgatctagtgtgattatatgttgtatgcctccctcggctcatggttaatttattctattttttttttacaattttttttagttataactttgcatctgcttcccttgtaataaagaatttttattaaaaaagatcaaaatatttttattttacttatttttgagatggaggcttgctctgtctcccaggccggagtgcagtggcatgatctcagctcactgcaagctccaggttcatgtgattctcctgcctcagcctcccgagtagctggaattacaggcacccacaaccacacctggctaattgttttgtatttttagtagagacggcgttttgtcatgttggccaggctggtctccaactccagtctcaagtgaaccgcctgcctcggcctccccaagtgctgggattataggtgtcagccactgcgcccagatagcgagggggctttttaaagcctggaagcttctacatgatttctgagacctgttaatgggaattaacagaacgaactaaactgtgttaaatcactttcaattattattattactttttgagacagagtctcgctctgtcatccaggctggagtgcaatggcacgatctcagctcactgcaagctccacctcccaggttcaagcgattctcctgcctcagccaccggagcagctgggattacaggtgtgggccacaacacctggctaatttgtgtatttttagtagagatggggtttcaccatgttggccaggctggtcttgaactcctgactgcagatgatctgtccgcctcagcctcccaaagtgctgggattacaggctgagccaccgctcctggcagtttcaatgatcagtttacctacgtgggacagatagttctatttctttaaatgtaataggtattttctcttaatgttagcatgtaaatataagaagtatttacataatataaagttgtggcaaaagaaattttttcttacggaagacatctttagtcattggctaatacttcatgtaagctgacctcacttttaaaatatgtttgatatatgcctcccttcctctgctcatggttaatttattctattttcttataatatttcttagttataactttgcatctgcttcccttataataatttttattaaaaaggttaaaaaaattttttttgagatggagatttgctctgtctcccagtctggagtgcagtggcacaatctcagctcactgcaagctccgcctcctgagttcaagtgattctcctgcctcagcctcccaagtggctgggattagaggtgctcgccaccacacccggctgatttttttgtatttttagtagaggtggggttttgccatgttggccaggctggtctcaaactcctgacttcaggtgatccacccgcctcagcctcccaaagtgctgggatttacatgcgtgagctgctgtgcctggctaaaaaggataaaaataaatctagcagaatgtattacaccttatgtaactaaaaccagtaagctaaattttaaaacaattgtatttataacaactttttctataaagtattttttactaaatatttacatctgatttacagtgttttagctctactgcattaaaaaaatttgctgtatattttattaatacatcaacttgaatagtatttctattagtactgcagaacacagcagccctgtattcaaaaattcacttaccccaaataactttgcctccttgtgtcacaaggcccaattcgctcacatttacttcaatgacagtacctttggtaataacacccaaagttgtatacagtggggatgagggattcttctttacaccaagtattggtaggcaaaaggtggctttcagttcaggatgtgttacatgggctttcttgaaacgcaagccctagtaagtcaaacacaacataagaatgtttacgtccaaaatgttaacagtgatgagtagtggtcgttttcgcttatctttttcaaccatctccaaaaaactatggttgaataatgtcatcttaaagaagctaacaaaatatgttttacagagtaaaaagctgatggttacagtataaatatgtggggaaaacacccacacaaatacttaagaatttctttttcttttgagacagggtcttgcccagttgcccacgccagagtgcagtggcgtgatcttggctcactgcagcttggacttcttgggctcaagacatcctcccacctcaggctcctgagtagctgggactacaggcacgcaccaccatgcctagcttattttttttttttttttttttggtagagatggggtttcgccatgttgcctgctggtcttggactcctgggctctcaacgtatccacccacctcagcctcccaaagtgctgggattacaggccaccacagctagcctctgaaaagtttttttttttttcaccctgtaatagctacctagcaacatacccagatttttactgtctagtcatctacacttagacttactaaggactttatatataccaggccactatgctagctcacaactggctcacttaaacacaataacctcacaacaaacacatcccctctcctctgttttcaaatgatgtaacaaggatcagcaggttaaatgacttgtttccagattaaatggtgagtggtaaacagactcaaaccttaatatcctgattccaagtctttatataactcggctaccttccatgatgaaaaaaggagtggactgtcagctttctttaggttgatggcaatatgagactggaggagacccagaggagtctttgttacagaaactggttatggagtcacccagtcacctaataaggtcttttagggtgtagtactttaaacgtcacaacattttgcagtcttcatttttgtgtgcatggggatggggggaaaaaatcactaaatcagtttcttagtaacagactcattaatcaagcttgtaagaaactgacaccattcaggatgccatctgattataatgacaaatctgtgaaactacagaaaacctagaatagcctgacttgtatattctctccctgtagaactgttaaggctaccaaaatatattcagactatgaatatgaaaccaaaacaagtcgagtccatgatataatccggggtgggcaaacattttgtgtaaagaacccaataggtaaacactttaggctttgtcaggccatatggcctctgttgcaactgctcaattctaggggtaggggttatgcaatatgtaaatgaacaggcatgactgtgttccattaaaattttatttacagaaacaggctatttgccaatattttaatctattaaaaattactcacgttggccgggcacggtggctcatgcctgtaattccaacactttgggaggctaaggcgggcggatcacggagatcgagaccatcctggctaacacggtgaaaccccgtctctacaaaaaaatacaaaaaaattagccgggcgtggtagcgggcacctatagtcccagctactcgggaggctgaggcaggagaatggcgagaacccgggaggcggagcttgcagtgagccgagatcgtgccactgcactcccgcctgggatacagagggagactccgtcccaaaaaaaaaaaaaaaaaattactcaggttgaacactaggattatggcatgttgcaactttcctctctctgatactttgtttttttgaggctgtgtatctaactgggagaatagttcagtctctttgaagggattttgcaaaaatatatcttcaactatgtttctccccaggggtggggaagtttggggtcacattactattgctgccttcaacagaaattaagctatattaaattatcttccttttttcaaagattttctttttctttttttcttttttttttttttttgagacagaatcttgctctgtcccccaggctggagtgcagtggcatgatctccactcactgcaagctctgcctcccagattcacgccattctcctgcctcagcctcccaggcagctgggactacaggcgcccgccaccatgcccggctaatttcttgtattttttttttttagtagagatggggtttcacagtgttagccaggatggtcttgatcacctgacctcgtgatctgcctgcatcggcctcccaaagtgctgggattacaggcgtgagccaccgcgcccggcttttcaatgattttcaaaagcatttagatactttccttatcaaactggaattgactcttataaaacagtcctactcaagttttcgaactgctgtcaaagacaagaagtgttttgagacctagacaatatcaggcatattgtagatcactagtttaatgaggaaaatatgactgtggaaaatgaagattctaatatgtcatgtttaaaagtcagaattcactgacaatgtcttatgatactactttttcaaatctctcacgaagctgaaaagattttttttttttttgagacggatttttgctcttcttgcccaggctggagtgcaatggcgtgatctcagctcactgcaacctccgcctcccaggttcaagcgattctcctgcctcagcctccctagtagctgggattacaggcgcccgccaccacgcccagcttattttttgtattttttagtacagatagggtttcactacattggccaggctggtcttgaactcctaacttcaggtgatccacccacctcaacctcccaaagtgctgggattacaggtgtgagccaccgcactgggctaaagatttttgactagtggaaaaagtactaaataacttctgtcaataaaataacaaaaattgcataaaaatatctttcaacctgttccacatcaatttaaagaatttcaggaaatgataatgttctttatccgatttaataaagtcaactaacatttcggtcattacactcttccaaggacttaccattggcctgatgaatctttcatatttaggtggttttcttgtaaagccatctccaacaaagcacactttagtaaccattctcttccatgccttcttctttctctttcctgttcgaataacttttaatacttctgtttctccctgggcacgtactttaggcagagggacttcccattttccctaaaaatatgccacagttaaaagtttatattgttattaaaggacaatgagaataagtcaaatatgttttagttgtacaaagtaatagatctattttttttgcttgaccatcaacacatttttggctcaaccgtcttctagaggtctgtattgtctcataagctgcaaattaaacagaacaagtttatatatcatgggtatgttaaataaatggttggcttaagctaaaaatcttaatgctgtgttatgggtgagaaaataccacctgtaatgtggtggttttttttttttttttttttagatggagtctcgctctgttgctcaggctggagtgcagtggtacaatcttggctcactgtgcagcctccgcctcctgggtacaagcaattctcctgtcttagcctcccgagtagctgggactacagacacacaccaccacacccagctaatttttgtatttttagtagaggtggggtttcaccacattggtcaggctggtcttgaactcctgacctcaggtgatccacctgccttggcttcccaaagtgctgggattacaggcgtgagtcacggtgcccagccgatagtgacttctataagcagtatatgtgtttactaatgtttaatagcataatactggaagagtgtttccacctcttaatatgtctctgtatttcttcccgagatggatctgtagatcactagcaagacaaaatcctcaccagatgttttatgcctcccttgagtgcaaattctatgaaaaaactgaaatagtgtaaggcagtaaaaataattctttaaatataaatactgcatattcttttatctggatttctgctaatctatttacaggtgttttaaaaagccacattttttgtgacaactcagggagttttccaccattctactttttaaccaagtttggcactacagggcagcacaaataagaagcatttgtatttttctttatgactgcatagcactgtgggttttcaaacaggaagacaaatattgaatttgaaattcactccttaccagctttttaatttcatatggcattctaataaattttttttataacttaaattttaaaaccttatgatgagaaagcaagttttttattaaatttacaaagacttcaacatctaaataatgggaataatagctgtacttcatgtttgaaattaaaccgagaaacaagaacctcaaatttgaatttaagtaattctcctaaacaaaacaaagacttcaattgttattgcttaccgccttctcttttcttttctgtttaatcatattggaaagtactttagctcgagattgtccctctctgtccagcagataggcaggtactgctccctgtggtgtcttttcatcattcttttgtttggtgtttctcttttcatgcatcttgatactaccaagaaggaaaaaagattcaagattatctgttttaataatgattactcaaaagatgttaacttgttatgacaaataaatgagaccacttacgtctttttcatttgtattttctcagcatgacgctgtttatggtaaagcttagccttcagaccaatcattttctttgccttctttgaacgttcatgagcctctcgactttccttctttctctttttctcatggtaatccaaacggtatccatagcgtttacggtgtaattcaatatattcattctgtggctataatgatggaagaaatattattttaattttttaaagtactgacaattattctaaaatgctttcttttacacagcacaaagaccctgtttcatccaaatgttcacttacttaaatgattcttgcaccattaagtttattcacatgatgtaagttaaattttggtcttgaatgatatgaggcatcagggcttacatctctaataatctcattagggaatggtccaaaatctactggaccacaaaagggatgaactgattacagtatcttttttccttgacataatttgcttttttaataacaccttcatttcacatttaaaaaatttaagtcagttttattgaagcataatttacacacagtaaaacctgtcctttttaggtatacagttctaagtttttcctaactacacagttctgtaaccaccacaatcaaaatacaaagaatttccatttccccctaaaattccctatgtaacttttaagtcaatcctctttcccaaccctcagtttgatacctatccctacagttttgcctttcccagaatgaaacagggatcaacagtagtacatagccttttgaatctggtttcttgcttttgggattcacccaatttgctgcaggtataggaacttcaatcctttttattgttgagtagtatgctattgtatggatacaccactgtttacccgctgaccagatgataggtatcagggttgttcccagttttgggtgattacgaataaatctgcaataaacaactgcatgcaagtcttcatgtggacgtgtgtttactgccagaccgttttccaaaagtgcattatttttcttttcaccagcaatgtatgggatgctttttgcattttagacacgttttaaacacgcggccaggcgtgagtctattcgtattttaaggctgcaaaaataaaaatgatacaaagccaagtccagcacagagagcaatgttaagtaacaaccaacaaggtgtgctgctaccaactgctatcacataaactttgcagcaatcacatgaagggtgtatggaatgccattttgcaaagaaacgcagattatagagacgtaacacaaagagaaaggacctggcagttagatctgggccgttaagcccggcttcgcaattcattagctgtctggtctttggcaaggacgccttcagtttcctcagcagtaaaatgaagggggcgggactgacatctaagactgtacaagggacaaccatattcccattaggctctggggctgataaccacgcttgtggtgaaatcaggaatttttaggactcttagcggtggatcaaaaagaaaaaagaaaacaggacagagtaaaatcttgctccaaagcttgtgttctggcaaataccgtctgtgtctcgaatgtgaagttgtttccactcctcagagcccaccccacgggtctaccatccttttctcttggcagttctcatttccgcctaccaccgctcaccccctaccccagcgccccagagtcctcaggtcccactaactcagacgctgtgtgtcgcgagcgtccgaggcatcctccttaccatggtgacggccgcagagccgccaggagcagccgctggagtgcgaaaacgctctcaattttcgggtctcaaagacccacaagcccacaccacgcaggccgggacaggaaagagtcaccctttaaaacggccgagtgaagagcaagaaccacgcagcggttccgagcctctgttttccgcttttagctaggaggacggaagttgctggcaggcggcatttggccggtacaccgccggaagtgtggaggtgtggctgcccgaggcggtagagcggagaaagcctattttcttttcgtttagatacattgccttttgcctaggctggcgtcgagacttgaggccgttgcagactttggcgcggctcgcgcctcctgcttcaagagcccagcggtgagagctggcctgcggcacgcggcctaatgccaggtgagtactgctccgagctgtgagacatcgcgcgcctgtgaccctgtcacagcgctgggtaccgctgacctttcaggctgcgacggacacagccagccacggaagaggacaacagggcctccggactcccctcggtgttcgctcagtatggaagtttttctctatcattcggcgaagtcgactcatctttgttccggtcactctgtgtaatgtgtgcatgattgtgaaggatactgaggaatgaaaacttagtgtacagaaaaatggaactactggggctttgcagctgttagaaaagaagaagataacattctggttttttggaggtacaggactgattccagaaatttctgaggcattttggtgcaccgaatcaaatgctgagtggacttgtatttagtggccccctagtgtcaagaagtaattaactaccagaaagtacgtctacttaaatacactatcaggtttacccttttactgcacagttgcagaagttcccttaattacttcacagcttgcagcgtgattcagttgatgaacaaaaagaactgtaccaaaagaatactttcattaattcttagtgcttgtatttgaggcagtattttgtttttgtttttgtttttatgggtattttgagacggcatctcgcccagtcgcccaggctggagtgcaggggcacgagctcggctcaccgcagcctcgacctcccgggatcaagcgatcctccgacctcagcctcaaaagtagcgagctacaggctcgcgccacgaagcctggctgatttttgtagtttttgtagagatgaggtttcaccgtgttgcccaggctggtctcgaactcccgggtacgagcgatccacccgcctcggcctcccaaagtgttgggattacaggcttgagccacagcgcccggctttgaggcagtttttgttttgttttgagacggagtttcaatcttgtcgcacaggctggagtgcaaatgcgccatctcgtctcactgcaacctctgcctcccgggttcaagcgattctccaggttcagcctcccaagtagctggaattataggcgctcgccaccacacccagctaatatttttgtatttttagtagagatggggtttcaccatgttggtcgggctggtttcgaactcctgacttcaggtgatccacctgcctcggcctcccaaagtgctggaattacaggcgtgagccaccgagccccgcctttgaagcagttttttaaggctccattttctaaggtgatctcatcattctctttaaaaccagaaatagtaactagcatttgtatattttaggtacagtacgttatataatctctttgcctttaatgcgcccctccccgccgtccctcaatcccccgaatttcctccctcatctacttcaggtctttgcttaaatgtcactgtttgaatgaggccttccttgatctctttacttacagttctaactgtcccaattcctccttcctgcttcattcttctctacagcaccctatcatcatgggagagactatgtattgtattcgttacttttgtttgttgtctgtatcccctgactacggtagaggcagtatgagggcagagattgttgtcttttgttcactgcattaacgctgatatctagaaagcagtgggtaggcagacacacagtaaattcttgttgaataaatgggaacgaataggcttgggcgggggagggctgggttgtgcaaattatctttttattgacaaccactgagttaaagaagaggaaaatgtctattacagtcacaactgtggagagactatgaggccctgaactttggcgttaccaatgaaaagggaatggattcaaggccaggcatggtggctcacgcctgtaatcccagcactttgggaggccgaggtgggtagatcacttgaggtcaggagttcacgaccagtctggctaacatggcgaaaccccgtctctactaaaaatacaaaaagtagccaagtgtggtggcacatgcctgtagttccagctactcgggaggctgaggcaggagaatcgcttgaacccaggaggcagaggttgcagggagctgagatcaagccactgcactccaggcttggtgacagggcaagaccctgtctcaaaaaaaaaaaaaaaaaaaaaaaaacaacaaagggaacagattcaaatatatttaggaaatcaaatgtaagtattagatgactttctaaataagagtagtgaatgtttcttagctaagatccagaaagaacagacttaggagtagtaatgaggtttcacatatcttaataacatggatcacaatggtttaacacaggggtgtctaatcttttggtttccctgggccacactggaagaattgtctttggccacacataaaatcactaatgataactaacaatagctgatgagctaaaaaaaaataaaaaaaacctcataatattttaagaaagtttacgaatttatgttgggctgcatataaagatatcgtgggccgcatgtggcctgcaggccacgggttggacaagcttggtttaacatggtctgtctgtctccccagcatccccagtctcagctgcgtccttatatttctaatagctttgatattgtacttgaaacatagtgaatatttagcaaatgtttttaaactaaagatgcttagtttctataatcagagaggaagaggacttgcttttatatattttttacatgatttagtttttacatggtatggtaggaaaatcagagtatacaaatgaatcaataaattttactgccaattagaaattaccaagttaatatgtggatgcttagctttttatgcttaattctatacatttacataacaatgcattttggttgatacaatgttttgtaatttcaataagttgatttctactgtatcgccatatctttctttaaacattacattgacaaataagggacattttaaacctaaaaaccatatttctcatatttaatcagaattttccattttctgaatgatgcattgaatttttggtagctaaaaatattgttccaactttttaaaagtaatacattttaccatacatattacatatgtctaacttacatatgccttgctgacatgtaatacataagtttagttttttgattttgtatatttattttttcagacagtaacagtttggaggatcaagatgttgaccaacttgaggatatttgcaatgagtcatcagacaatacccagtgtgtatattaatgtaagcatttcttataaaattaagtgtcctttaacaacctcagctcctttactgcctaaaatgcccagtatatctcatcagctgttgattccaaatttagttgagtcataacctttggaaatcttcaagctaaactaatttgaaagtaattaccttaatttattaagaaatataagaggaaattaccttaatttaaaagtaaaagaacagctgtagctaaatactggtctcatggagtactaaaatgccagttgtttttgaaggaggggtagggttttatatctaagaatgtcatcacttaatgcacatctttaaactactaacaaataatgtgctttgtaatattaagtatccatggattgagactcttatgaaataaagtttctgttaatatcaaagtacaacataattatacaatggttgatacaactacttttggctgtcttctgcagagctgttggaagccagcttcttcggcagtctgatatttgtctcaggaacattgttttagtctttagctctggtctgactcctgaatcctcttcaaaacactataaattattttctaaactatcacatcttcagtatacttaaagatattaaatctcaaacataataataccctttttatctatagctaagtgagagattactttaaagcttgtttgggttgtttctttttatcttcagtgacttaacagggagtacaatagtttccccttattcatggttttgctgtttagctgtttcagttgctcagagtcaactgtggtctgaaaattaaatgggaaattccagaaataattcataagttttaaattgtgtgccattctgagtactgtgatgaaatctcatgccatcccacttaatcccacctgggaggtgagtcattcctttgcccagcatatccacattgtatacactccccacccatgagtcagtagccatctgggttatcagattcactgttgtgatactgcagtgcttgtgttcaagtaacctttattttacttaatcacggtcccagagcgcaagagtagtgatgctggcaatttggatgtgccaaagagaagccataaagtgctccctttaagtgaaaaggtgaacattcttggcttaataaggaaaaaaacaaatcatatgctgaggttgctaagatctatggtaggaatgaatcttctatccatgaaattgtgaagaaagaaaaagacatttttgctagttttactgttgcacttcaaactacaaaaattatggtcacataacatgataagagctcagttaagatggaaaaggtattcagtttgtgggcagaagacatgaacagaaccatgttctgattgatagtaattaggttctgtactatctgaggtttcaggaatccactgggggtcttggaatataacccctgtggatagggtgtgactgctgtatgggagaacctgtaacccttaagaagccttaccattcgtctacagtttttttgttgttgttgctaagaagccttaccattcatctacaatttttttttgctactttaaaaatcacctgagcagcattttgaagaagatatatttctgtattccatttgtgatctcattaagtggcccaaggagttacccagtttttcttcagtgcttttattgctgacgctttcagactatgcacgctgtgatagacactgggtcttatcctagtcattatgcagtggaattattttctgaggatagtagcttattattgccagaaacttggtaactaatgtagaaataatatagatcgcacagatacgcagttcatgaaacaaaaagcagattgtggtggccctaaatcattacatacactaacaattccaactacattggcagctattaaatgtatatctagtggtctgggcataaactgaggtggagaatattcagcctttacatgagaacatgagaaggttaggtaagcagctaaggtagaggaggtaggcttggccttaagcagacctgctctaactcagtgattctcagttgaatgctacattggagacaccctgggaattttttttaaatgccactgcccagttcctccagttctcattttctctccccacccccgtgtcttcaagaagctttccagatgattctaatgtgtaactgtaataaatcctgaaaacaactaatggttttagagttcattgccccctacagacctttcagcagatgtagaggaaaaccaaggtgtatcctgggtgagataccttatttaacctttctgactcagcttctgactttcagaactttagggttgtggttctcaatctgtagctattagaatcaactggagagctagtttaaacagattgtttggctccatccccaagagtttctgattctcttgtctggattggagcctaagcatgtttttcaaacaagccctcagcccatgctaatgctgcaggttgaggaaaaccattgttttaaggtcagctcaaaatagcaaatcagtattaattttatccttattctttcccctaggatatatttggattgtcactttttaaaagaattggagttaataaattaggactactttaaagctatacaaaatattttatcttctgacaaagcgtaattacaatattaacactgtaataagtgatgctaaaataaaattaatgccaagtttctttttctctttactagaatatatgctgctataaaataagagcaagtttaaaaagattaaagccacatgtgccgcttggaagaaattgcagttctctaccaggtacaaatgttagagtcttctaattttatctaagctgtttgctttatctcttttctctctcttgtttgcaagaatctcccttattagggctctgtaaccattttttacttcttggctatttccttgagattattaggggcgggagtgttcagataggtgccagaaggaaatactagtagagttgtgctccttatctgaggaacacgctgatgaactgagcaaaggaaaggttggtggctttagtagctagtttgcaagtttaacatgtgagtgtaattgtagagtgctcttgtgaatttctttttctagtttatttctgttttttatgcaagtgttttctgtcaagagagatttactagaataatttattttgaggattgttataagtagtttggctaagtatttgggattgtttaggttagatacatggcatcagaagctggaaggtggaggagttgacttacttttgaatgtcctttctgtgtttgaaacaagcaagtgtatggtagactctatgaaactagtttaattctgttgctgttctcattactgtgtttgtcatgtgagaataatagaataaaaatactgattggctgttgacttacaagggcagattaatttaatgggctacgttattggtgtgtatctaggtctctgaatttggctaatatgaatttaactgtagtagtatagattatcttttgatcttcaaaccaccatgaagtttcaaaaataatataaaattctcctttttgtattatagaaacatgggagaaatggtttaaataacaggaaggctttaattaaatttacaaatgtaactgccttgtttctttagaaattacttcttaatattagtaaactatatattaagcatagaataagccatatggacttttttatttaagaaatactgcttggcctttcaaaagtattaaattgttatagcttctattcagtgaaacctcccaggcagtctttaaaggtattgtgtcctgggattgctgaggaaggcaagttccaaattgtataataattcattatcagctgacatgaggatcactcttagctcttcaaaccctggaaaaggcaggtttataggactgtgcatttaaaattttttctttgattcaggatcattgccttaagattattattatgagcatttattctagttctacaattttgtaaatggaagtgaagtaggtggcagagattggggtgaatctgtatttttctgaggatatgatctagaacttgatgtttaaaacttttaccttgttttattgtcatccatagctttccttatacattgcaaggaaataaattttagtttattttagatttatttagcttgaattttactttatttggacttacagtatttgcttaaagttattttaaagtctttcatttataaattaaaggaaaatttcataaatgtaacagttcaattttaactttcttttcattaggcttaataggaaatgatatcaaatcccttcattccatcatcaatcctcccatagctaagtaagtactatcattatatcatgcttttccatagactgtcacgaaaatttacaggttttttctgatggacaagagtgaatgctgtaatttctatgactttctgccctagccaattttaagtagatgttgataatgtatcttagctattttttctcaattaatgctaaaaatttttaatgtaacaacagcacacttttctagaatgaatataagatagtctcaaaattgtaggttgtagttagcccttttgttacttagctatcttatcagagtaatgtggatatactctaaatgttttccatttttctagtttttacacagttttataaattatagaaataccagctttgaaatttggatagcatatatactttggttttacaattttagtaaagtttaccttattttttccttttaaacagaatccgtaatattggaattatggctcatattgatgcaggcaaaactaccaccacagaaagaatattgtactattccggatatacaagatcactgggaggtta

SEQ ID NO: 868 - DNA, 1092 bp, Homo sapiens
ctatatttcagaagtatgaggctccttcctaaggcatctccttaaatcttgccacctccctaattctacagtcttatttatattcccccacagctttcatctacttctgtaactcatggagtgattctccaatcaacagatcttcctgcctgccggcttatgcccttgatgtccatttttgggtaggtttggaggtgcaccccacaatgttagacctatatggcaggagtaaaactgcccccagtgttagacctatatggcaggggtaaactgcctttgggggagctgtggttacaagggcttcaatcatattggaggcttcaatcatcctttgatttgtactgagtactggttgcaagctggcctgttaagtatatattgtgttgccataacaaaggcctaggaaaatttgaagaaaaaaaacactgaactgttattttttgtaatttatttaaaaatggacaaaatggttattagaatccaaagataatctaaaaacagttctactctttggaagtattgtgtactcaaatttgcacttaagttggagaatgttttgagaccatttaaattgttttaaaaatagcttgatcttgatccttatgcaaaagaaactaagactttgtgtcattatttgaggtagctaaggactgatgttgaaagtgtattcagtctatagtaagctgatgtcaggtcagtaaattttgtttggggatgttggtattttcgatcaagttaaaatcttaaagcagacaaaaatagtaaacgctcctatttgtgttagattttgaacaattgtattaccctatatttttctttaattagtcaaaggtaagccagattatttcattctaaatgaaaattaaagcactttggccatttattttttcaacaaatgctaatactaagtaaaaaaaaaaaagtatgactactattagtcaatctaccaaacatttatgctgttttatacattttatgagaaacttctgtcaatatcacaaagggaaatactctgttaagattcagtaaattcttaatctttacatgtttcatttcttagatttgaaaacacttgtagatattttattttta

SEQ ID NO: 869 - DNA, 483 bp, Homo sapiens
aacactataaacttaacatctgtattaatgctacctaccttttttaggattaatgattaacgagattttgaagatacttcagttaaattctcagacacataattgtgtattaacctttttgaaaggcattttcaatgaacactggtggttttttcaggaaattgctgaatacccactcacaaatgcagatattgatgaagtaggatatttgtatatttgctttttttcaatcattcagttttatgaacatggggtcaaagcgtatttcaaaataaagaccatttataaaactggaccactttaatgtttacaatttaataaatctcttcattgcagacatgtatggctgtttggtagtattcagaaacatcacagtaatggcagtttcttcaattggtgtgtagtcctcaataattatatatgaaattgctgtcaaaccagtaagactgcatttatacatccatcattttcaggattgttggt

SEQ ID NO: 870 - DNA, 2537 bp, Homo sapiens
cagaaatgttgatggatgaaggcacatctgatgaaaaggggcacatggaagagaaattgtccctacttccaagaaagaaagcacatcttgggagttcagacaatgttgctactatgtcaaatgaagaacgatctgatggtggttttccaaactctgtgatagctgaattttccgaagaaccggtctctgagaatttgtctcctaatactacttcctcattggaagaccagggtgaggagggggtatctgagccccaggaaacatctactgctcttcctcagagttctttgatagaggttgaacttgaagacgtgccattttcacagaatgcaggacagaagaatcagtcagaggagcagtctgaagcatcttccgagcaactggatcagtttacacaatcggcagaaaaagctgtggatagcagctcagaggaaatagaagtggaagtgcctgtggtagacaggcggaatttaagaagaaaggccaaagggcataaaggacctgctaagaagaaagctaagctgacctgaaggaagaagaaagtggatgataaatcctcttctttgtaacatagttgttgtttttaaaatatggtaattaataaacagcatggggcacaggacaaaaatttccaaaatttcaatttgaacttacttactatgcagttttttgcttccctttagaacgtagaattcaccattgtttttaattttccaggctatttttggtaaatgcaattttttatttttattaaccatgtttcaattttgggaaaccagatcatattatattttctttatcaggtggtacatctgaccattatttcaaaaatataattaaaaagctgtgaaagtagtaggatttccattacttataaggatcacagaaatcttttatactaagggttttaatagtaaaacttggtgagggttctagaagttttaaatttcaaaactaatcaccaattttttaaaatgtaggcatgcctaaacaaaaataagtgtcaataaattagaaaaaatataacttcaagtaaatgagagcacaaaaacagaaacttacggtcaaaggttcatgaagatattttggttttggcctcttaatcctagatatagatgcagttttttcctttgacttcactatctatggaaaggtacacataaaatctgtttctgattcattctatcatctgatgttaacagtactgtcagggatttaactgtggcatgtggggactaattatttaaaatttcatttgaagtattagtttgctgtaattttttttgtctgcatatgtgcagacgcctagaagtttagactttcacctttaatcaggtaaaaatcacaactatactttggagacatggtttaatttggacttctggtcctgatcagatagataaattaagctggagattttacttttatcccaacccagttaacatctatatttcagaagtatgaggctccttcctaaggcatctccttaaatcttgccacctccctaattctacagtcttatttatattcccccacagctttcatctacttctgtaactcatggagtgattctccaatcaacagatcttcctcgtgccggcttatgcccttgatgtccatttttgggtaggtttggaggtgcaccccacaatgttagacctatatggcaggagtaaaactgcccccagtgttagacctatatggcaggggtaaactgcctttgggggagctgtggttacaagggcttcaatcatattggaggcttcaatcatcctttgatttgtactgagtactggttgcaagctggcctgttaagtatatattgtgttgccataacaaaggcctaggaaaatttgaagaaaaaaaacactgaactgttattttttgtaatttatttaaaaatggacaaaatggttattagaatccaaagataatctaaaaacagttctactctttggaaatattatgtgtactcaaatttgcacttaagttggagaatgttttgagaccatttaaattgttttaaaaatagcttgatcttgatccttatgcaaaagaaactaagactttgtgtcattatttgaggtagctaaggactgatgttgaaagtgtattcagtctatagtaagctgatgtcaggtcagtaaattttgtttggggatgttggtattttcgatcaagttaaaatcttaaagcagacaaaaatagtaaacgctcctatttgtgttagattttgaacaattgtattaccctatattttctttaattagtcaaaggtaagccagattatttcattctaaatgaaaattaaagcactttggccatttattttttcaacaaatgctaatactaagtaaaaaaaaaaaagtatgactactattagtcaatctaccaaacatttatgctgttttatacattttatgagaaacttctgtcaatatcacaaagggaaatactctgttaagattcagtaaattcttaatctttacatgtttcatttcttagatttgaaaacacttgtagatattttattttta

SEQ ID NO: 871 - DNA, 204 bp, Homo sapiens
cttggctaacttttgtatttttggtagagacagggcctcagtgtgttgctcaggctggtctcaaactgggctcaagtgaagattccttttataaggctgaataatattccatgtgtttttatttatttatttcaaactaatgcagtttattataacaagaaggaaatcaagctttacagtaattatagtcactaagctgaaaaa

SEQ ID NO: 872 - DNA, 2538 bp, Homo sapiens
cagaaatgttgatggatgaaggcacatctgatgaaaaggggcacatggaagagaaattgtccctacttccaagaaagaaagcacatcttgggagttcagacaatgttgctactatgtcaaatgaagaacgatctgatggtggttttccaaactctgtgatagctgaattttccgaagaaccggtctctgagaatttgtctcctaatactacttcctcattggaagaccagggtgaggagggggtatctgagccccaggaaacatctactgctcttcctcagagttctttgatagaggttgaacttgaagacgtgccattttcacagaatgcaggacagaagaatcagtcagaggagcagtctgaagcatcttccgagcaactggatcagtttacacaatcggcagaaaaagctgtggatagcagctcagaggaaatagaagtggaagtgcctgtggtagacaggcggaatttaagaagaaaggccaaagggcataaaggacctgctaagaagaaagctaagctgacctgaaggaagaagaaagtggatgataaatcctcttctttgtaacatagttgttgtttttaaaatatggtaattaataaacagcatggggcacaggacaaaaatttccaaaatttcaatttgaacttacttactatgcagttttttgcttccctttagaacgtagaattcaccattgtttttaattttccaggctatttttggtaaatgcaattttttatttttattaaccatgtttcaattttgggaaaccagatcatattatattttctttatcaggtggtacatctgaccattatttcaaaaatataattaaaaagctgtgaaagtagtaggatttccattacttataaggatcacagaaatcttttatactaagggttttaatagtaaaacttggtgagggttctagaagttttaaatttcaaaactaatcaccaattttttaaaatgtaggcatgcctaaacaaaaataagtgtcaataaattagaaaaaatataacttcaagtaaatgagagcacaaaaacagaaacttacggtcaaaggttcatgaagatattttggttttggcctcttaatcctagatatagatgcagttttttcctttgacttcactatctatggaaaggtacacataaaatctgtttctgattcattctatcatctgatgttaacagtactgtcagggatttaactgtggcatgtggggactaattatttaaaatttcatttgaagtattagtttgctgtaattttttttgtctgcatatgtgcagacgcctagaagtttagactttcacctttaatcaggtaaaaatcacaactatactttggagacatggtttaatttggacttctggtcctgatcagatagataaattaagctggagattttacttttatcccaacccagttaacatctatatttcagaagtatgaggctccttcctaaggcatctccttaaatcttgccacctccctaattctacagtcttatttatattcccccacagctttcatctacttctgtaactcatggagtgattctccaatcaacagatcttcctgcctgccggcttatgcccttgatgtccatttttgggtaggtttggaggtgcaccccacaatgttagacctatatggcaggagtaaaactgcccccagtgttagacctatatggcaggggtaaactgcctttgggggagctgtggttacaagggcttcaatcatattggaggcttcaatcatcctttgatttgtactgagtactggttgcaagctggcctgttaagtatatattgtgttgccataacaaaggcctaggaaaatttgaagaaaaaaaacactgaactgttattttttgtaatttatttaaaaatggacaaaatggttattagaatccaaagataatctaaaaacagttctactctttggaaatattatgtgtactcaaatttgcacttaagttggagaatgttttgagaccatttaaattgttttaaaaatagcttgatcttgatccttatgcaaaagaaactaagactttgtgtcattatttgaggtagctaaggactgatgttgaaagtgtattcagtctatagtaagctgatgtcaggtcagtaaattttgtttggggatgttggtattttcgatcaagttaaaatcttaaagcagacaaaaatagtaaacgctcctatttgtgttagattttgaacaattgtattaccctatattttctttaattagtcaaaggtaagccagattatttcattctaaatgaaaattaaagcactttggccatttattttttcaacaaatgctaatactaagtaaaaaaaaaaaagtatgactactattagtgaatctaccaaacatttatgctgttttatacattttatgagaaacttctgtcaatatcacaaagggaaatactctgttaagattcagtaaattcttaatctttacatgtttcatttcttagatttgaaaacacttgtagatattttattttta

SEQ ID NO: 873 - DNA, 2503 bp, Homo sapiens
ctaggaagtagcagaggccccttcctgtagggagttgccatggagacgcggtggggcaccgacggagttctaatgacggccgtgattggtgcaggatcctgctaatctcaggaaggcccgtagagaagtgaggaaaacgtggtggggggcatgcgcgatctggtaggcggtgctgccgtctgttgtacctgagaggcttgcgcatgccgacgcacggattcgaggcggggagcatgggaagaagcggccaggagtatgacctgatcattgcgaccaccgctaggggaagggaggagagggtgtagaaacggggacgagggtgggggaagggcaaggaggcgctcgagctggtgcgcggagcatcctgggagacgtagtccagcgggagggggaagtcgaagactgcgcgtgctcaggagcgcggagcggcccgctgagcgcagaggtgagggcggggtcctcttaaccgggagggctatcgtgtggacgggggcggtggctgcagactcggggattccggctccccagtgagaccggaagcgcggggaacgaatccgggcagtccttgcgggagcgcccagggctagagcgagaggcttgtcaatcactactcgttgccacgacgacaggctttgggagccccgcccccggttgcctaggcgtcgtctggacctaccttggcaccctggagcggaagttgccgcctggacttctgggaagtgtatttcgggaccctccgtaggtacctgccatcttggctatgacccaagtctctcccagggtttcaggttgacttggcaccttgaagagtggaggcttggcccccaggatgaggcggccctcgaaatcgatgccacccacgggggaatgattctgcggtgccatccccttcataaacgcagattccttcctaaagccgcagctgcagaaggaacagcgcgaggagggaggtcagccccacttgcaaatggggaaacaagttctcgaaggcacagtgatctgaagatgggcggaatcagagtctcgggacttccttgcaggctcctgttccggcagtcttggagcctttgccgcccccccacccattgcgaagctcccccatccccttccaaccccagctaaatcaggaagctgagatggggcattgcgtagtgtgatgttgggcttagaagatggggctgagtagggagagagggtgctgcctgggagctgagccatacaagtgactgcacaggttgacatggaggattaggtggagtgaggcttccaagcagggaggggaatgatggtggggcccaaatgaggagccacatcgaagtagatgagagaatagaaggtgaagtaagggctggcgttgggtagggggagacgccagcagtgatgctgatgcccaggctgtaggtgtataggtgccatccacctggtaaagagagagctgtagcgcaggaatgaggttgcacatgtagaagaagggaaggatacaggggagagaagtgtcttctagtcctaaaaaacagcctgtgggctggcatggtggaacaaacctgtaagtcccagcacttcgggaggtcaaggtaagaggatcatctgcttgagcccaggagttcaagaacagcctaggcaacatagtaagatcccatccctacagaaaaattaagaaattagccggatgtcgtggcacacacctgttgtctcagctacttgggaggccgatctctggagcccgggaggtcaagtctgcagtgacgcatgatctcgccactgcacttcagcctgggcaactgactgacagcatgtctcaaagaaaagaaaaaaaagcctgtgtttggagcagggagactgtcagagactttgcacaggcccaagcggagagaagaccagggatacaggtggctaagggagggcttccagctgcataagtctgtgggttgtagatggcctttctttgcctgtttcctcatctgccttccacatggggtaggtctgaggatcaaacggtacagcatagactaggcagtgaagcattcactgtactccttttgcaacagcctcatcctatttcttcaccaggggcagacactggcctcagatacctgacctggtaccctctatgaggcctgcggtgctgggctccccagaccgagcacccccagaagatgaggggcctgtcatggtgaagctagaggactctgaggaggagggtgaggctgccttatgggacccaggccctgaagctgcacgcctgcgtttccggtgcttccgctatgaggaggccacagggccccaagaggccctggcccagctccgagagctgtgtcgccagtggctgcgtccagaggtacgctccaaggagcagatgctggagctgttggtgctggagcagttcctgggcgcactgccccctgagatccaggcccgtgtgcaggggcagcggccaggcagccccgaggaggctgctgccctagtagatgggctgcgccgggagccgggcggaccccggaga

SEQ ID NO: 874 - DNA, 576 bp, Homo sapiens
tgagcatgtgtcaaaagatttatttaccgtactgagggaagcagcaagatgattctaggaagacaggaaaggaagaataaacactggccggccgcggtggctcacacctgtaattccagcaatttgggaggccgaggtgggcggatcaccagaggtctggaggtcaagaccagtctggccaacatggtaaaaccccatctctactaaaaatacaaaaatcagccgggtgtggtggagcagcctgcagtcccagctactcgggaggctgaggcaggagaatcgcttgaacctgggagacggaggttgcagtgagccgagatcgtgccactgcactccagtctggcaacagcgagactccgtcaaaaaaaaaaaaaaaaaaaagaaagaaagaaaaagaaaaacactgaaataaaagcacaaagttggatacaaaactgcttagtgagctacaaagcgatacactggacagaaagcatttgcaacctatcaacctgtacagggtagcatataactggacagcatctggactcctaagttttcctaacagttttacctcggattctccctgtctctctt

SEQ ID NO: 875 - DNA, 318 bp, Homo sapiens
gagggactgcaggtggtcccttcattctttgctcagggcctaggggaggtaggtccttggaggacctagtcagtaggtatttacaaggcaggcccctgggatcctacagtgggatgggcacccacaaaccccaggttgcggccagccttactctctggtaggacttctgatggtgggggcacctccccaggtcacagtccaggtgcagggccaggaggtcctatcagagaagatggagccctccagtttccagcccctacctgaaactgagcctccaactccagagcctgggcccaagacacctcctaggactatgca

SEQ ID NO: 876 - DNA, 621 bp, Homo sapiens
caaatttacggaacttggatctgtcctataatcagctgcattctctgggatctgaacagtttcggggcttgcggaagctgctgagtttacatttacggtctaactccctgagaaccatccctgtgcgaatattccaagactgccgcaacctggaacttttggacctgggatataaccggatccgaagtttagccaggaatgtctttgctggcatgatcagactcaaagaacttcacctggagcacaatcaattttccaagctcaacctggccctttttccaaggttggtcagccttcagaacctttacttgcagtggaataaaatcagtgtcataggacagaccatgtcctggacctggagctccttacaaaggcttgatttatcaggcaatgagatcgaagctttcagtggacccagtgttttccagtgtgtcccgaatctgcagcgcctcaacctggattccaacaagctcacatttattggtcaagagattttggattcttggatatccctcaatgacatcagtcttgctgggaatatatgggaatgcagcagaaatatttgctcccttgtaaactggctgaaaagttttaaaggtctaagggagaatacaattatct

SEQ ID NO: 877 - DNA, 509 bp, Homo sapiens
catttgttttaagataaaacttctttcataagtaatcccccacattcgctgttagcctcctggtgggaccaaatctacagttatagaaggtttgcacctcactggcaaatcaaggaaagaggtgaatgattccaggtgctcggagcttgagctgattcttggagatgactcagttatgggaacattttacagacaggcagagcctttaaaccaatgcctgacttagaaaagaaaattgcaggaaactatcaaaagatggtgctaggttaaagcagcaccctgagcagtttccagaggtgtctgaattacagtaaggcaagcacagggacaaagtgatgaagggttaaaatactgcaagcagacaactgcaaaatgtgaggagatgacaaaaatgtaaagttttcgactcagccttgtctctgaaacccatctctgtaaaatcagactagaggtttcactgccaatttcttctagcctgtatgtttcataaataaataaatgaaacagca

SEQ ID NO: 878 - DNA, 2700 bp, Homo sapiens
tggagatccctaaggaccacacttggaaactgatggtctatggcaatgggtccttttaggccttgaatccctttaagaatctgacaatatgaaactctgtctctaggaagctgctggaaggtacacatcttgggagtttgccctttgaagctcacctgtggaccttttttcctttcgtaagtccactgactccagttaggaatgcttggtctgataagcgtcctttttatgtaatgatggtggataaactgctttttccaatacctacacatacagtttcaaaaccaaggaggaaataagattgaaaaaaaggaagtaaggaataatggaagaaaggaagggaaaaaaagagagaattaaaaggtggtttactgtaatcccagcacgttgggaggccgaggcaggtggatcgcttgaacccaggagttcgagaccagcctgggcaacatagcgaaacgctgtctctacaaaaaattaaccaggtgtggtggtgcatgtctgtagtaccagctacctgggaggttgaggtgaggagatcacctcagcctgagaagttgaggctgcagtgagcggtcatggcaccactacacttcaccctgggtaacagagactgtgtctcaaaaaaaaaaaaaaggtggtttactcagtagagatctttatcttgcttgaaaggccaaagccattttaagaaggaaacttgctaaatcttctcctgtatgcgtaaatagtaatcccttaaaaataaatcactgcataaacgagatgactgcttgagtcatcattaacaacttatgaaaaagacagaagtgcctcttacagaggtgtaaagtatttatttgcaccctatcatgctggcagaaaatctgggaaggcaaatctgagtgcagggtagaaaatggtcagttgcagaatataaacattaacatgattataattacggacttgagaagtgaaaagcactggggaagttttaggtaaatacaacattccacactgatgctttcacagtttaatagcggattcacttataaacattctgataaagatcagaaactaaaatgcattcctgtttaaaacacaaatttgcatttaccaaagaaaacataattctgtgacaaaggaaaatacactcaacattatcaacaggcaatgatgctctcagtcaatggaaatttttacaaaggctctggaaaaataactggagatagcagttgtttgattatgggaagccaagagatcagaagaggcatgaggtgccttacggttctgggtaaagaattagggacatgatgcagtaaatgttaattaaatagtcttggcagaaaatgaccacaggtaatttcagtaagtatatcctaaataaataataaaatatgcagaaacgatttctaaggaaatttgagcacaaatgtttgctcattagaacactggaagggtcagtaatcagaactgtgtgcatatacaaatcacaggtctgggaagatcccataggtcgaaaatgtgtccttggacaaatggctcctctaataggctatctacgggggtgtggagcattaagagcaggtttactggagagacaaagataacaatagggtttggaaaggcagaccatttaaaaaaggctgattttttgataagcagggaaaaagttattaattttagtaatagtagtgacctatataaagatcattatacagataatggaggctgttttttaatttctattttgcaggaaaagaagcataagctgcaataaaaatttggtttcaagataacaaagtcagtccccaaaaatcagtattgagagtcactgacattaaatgatgaagatacgaggatggtgtggggacctttactcttcgaagatgagctatacatgcccctgaaaaggctgtctgaagacaggggaaggctggagatggcaactttggcctctgccaagtactcgtgctattttctgtatgtgatactatctgttttgtaactcagaggcaacaccacatacctagcataaggcttgaactccctttggggttatcaattacttacatagccttcctctaagggaaggcttgcaagtggttcatattcgacccttccatgtgataagcattcatgtgggcttcacaatgtaacagaggtacacagagattcttgtaaacagaaaattttataaaactgttaactgatctcactttgaagaagtcttactgactagatgtcatttatcagagtagacaggcttaaaatgcattgcttgtactagactgttgtaatgcatttttttgtttttgcattggtttttaattcatttaattggtttacactcatttttttttttacattccatttttgcatttgtatgccagttaaaaattatgaatggcacattgtgggattttgtttagctaaattctagaaaaattgaaagataccttttattctacttaagcctgaggttattcagcacggtgatctctgcatttttgaaaggttgtctcgtcgtttaataaacgtaaataacttaagcacattggaagagctattaaatgagagcaggagattaaaaagacatgatttcttactttatccacctgacaggatagcttgcattggtgattaaccttgcattgttaaattcatttcctaaatatttaggtaagtagttggtttgatcattatttgtaaagtattagtagt

SEQ ID NO: 879 - DNA, 98 bp, Homo sapiens
cctgtaatcccagcactttgggaggccaaggcaggtggatctcctgaggtcaggagttcgagaccagcctggccaacatggtgaaaccccgtgtttac

What is claimed is:

1. An isolated nucleic acid molecule comprising a polynucleotide having a nucleotide sequence at least 95% identical to a sequence selected from the group consisting of:
(a) a polynucleotide fragment of SEQ ID NO:X or a polynucleotide fragment of the cDNA sequence contained in Clone ID NO:Z, which is hybridizable to SEQ ID NO:X;
(b) a polynucleotide encoding a polypeptide fragment of SEQ ID NO:Y or a polypeptide fragment encoded by the cDNA sequence contained in cDNA Clone ID NO:Z, which is hybridizable to SEQ ID NO:X;
(c) a polynucleotide encoding a polypeptide fragment of a polypeptide encoded by SEQ ID NO:X or a polypeptide fragment encoded by the cDNA sequence contained in cDNA Clone ID NO:Z, which is hybridizable to SEQ ID NO:X;
(d) a polynucleotide encoding a polypeptide domain of SEQ ID NO:Y or a polypeptide domain encoded by the cDNA sequence contained in cDNA Clone ID NO:Z, which is hybridizable to SEQ ID NO:X;
(e) a polynucleotide encoding a polypeptide epitope of SEQ ID NO:Y or a polypeptide epitope encoded by the cDNA sequence contained in cDNA Clone ID NO:Z, which is hybridizable to SEQ ID NO:X;
(f) a polynucleotide encoding a polypeptide of SEQ ID NO:Y or the cDNA sequence contained in cDNA Clone ID NO:Z, which is hybridizable to SEQ ID NO:X, having biological activity;
(g) a polynucleotide which is a variant of SEQ ID NO:X;
(h) a polynucleotide which is an allelic variant of SEQ ID NO:X;
(i) a polynucleotide which encodes a species homologue of the SEQ ID NO:Y;
(j) a polynucleotide capable of hybridizing under stringent conditions to any one of the polynucleotides specified in (a)-(i), wherein said polynucleotide does not hybridize under stringent conditions to a nucleic acid molecule having a nucleotide sequence of only A residues or of only T residues.

2. The isolated nucleic acid molecule of claim 1, wherein the polynucleotide fragment comprises a nucleotide sequence encoding a protein.

3. The isolated nucleic acid molecule of claim 1, wherein the polynucleotide fragment comprises a nucleotide sequence encoding the sequence identified as SEQ ID NO:Y or the polypeptide encoded by the cDNA sequence contained in cDNA Clone ID NO:Z, which is hybridizable to SEQ ID NO:X.

4. The isolated nucleic acid molecule of claim 1, wherein the polynucleotide fragment comprises the entire nucleotide sequence of SEQ ID NO:X or the cDNA sequence contained in cDNA Clone ID NO:Z, which is hybridizable to SEQ ID NO:X.

5. The isolated nucleic acid molecule of claim 2, wherein the nucleotide sequence comprises sequential nucleotide deletions from either the C-terminus or the N-terminus.

6. The isolated nucleic acid molecule of claim 3, wherein the nucleotide sequence comprises sequential nucleotide deletions from either the C-terminus or the N-terminus.

7. A recombinant vector comprising the isolated nucleic acid molecule of claim 1.

8. A method of making a recombinant host cell comprising the isolated nucleic acid molecule of claim 1.

9. A recombinant host cell produced by the method of claim 8.

10. The recombinant host cell of claim 9 comprising vector sequences.

11. An isolated polypeptide comprising an amino acid sequence at least 90% identical to a sequence selected from the group consisting of:
(a) a polypeptide fragment of SEQ ID NO:Y or the encoded sequence contained in cDNA Clone ID NO:Z;
(b) a polypeptide fragment of SEQ ID NO:Y or the encoded sequence contained in cDNA Clone ID NO:Z, having biological activity;
(c) a polypeptide domain of SEQ ID NO:Y or the encoded sequence contained in cDNA Clone ID NO:Z;
(d) a polypeptide epitope of SEQ ID NO:Y or the encoded sequence contained in cDNA Clone ID NO:Z;
(e) a full length protein of SEQ ID NO:Y or the encoded sequence contained in cDNA Clone ID NO:Z;
(f) a variant of SEQ ID NO:Y;
(g) an allelic variant of SEQ ID NO:Y; or
(h) a species homologue of the SEQ ID NO:Y.

12. The isolated polypeptide of claim 11, wherein the full length protein comprises sequential amino acid deletions from either the C-terminus or the N-terminus.

13. An isolated antibody that binds specifically to the isolated polypeptide of claim 11.

14. A recombinant host cell that expresses the isolated polypeptide of claim 11.

15. A method of making an isolated polypeptide comprising:
(a) culturing the recombinant host cell of claim 14 under conditions such that said polypeptide is expressed; and
(b) recovering said polypeptide.

16. The polypeptide produced by claim 15.

17. A method for preventing, treating, or ameliorating a medical condition, comprising administering to a mammalian subject a therapeutically effective amount of the polynucleotide of claim 1.

18. A method of diagnosing a pathological condition or a susceptibility to a pathological condition in a subject comprising:
(a) determining the presence or absence of a mutation in the polynucleotide of claim 1; and
(b) diagnosing a pathological condition or a susceptibility to a pathological condition based on the presence or absence of said mutation.

19. A method of diagnosing a pathological condition or a susceptibility to a pathological condition in a subject comprising:
(a) determining the presence or amount of expression of the polypeptide of claim 11 in a biological sample; and
(b) diagnosing a pathological condition or a susceptibility to a pathological condition based on the presence or amount of expression of the polypeptide.

20. A method for identifying a binding partner to the polypeptide of claim 11 comprising:
(a) contacting the polypeptide of claim 11 with a binding partner; and
(b) determining whether the binding partner effects an activity of the polypeptide.

21. The gene corresponding to the cDNA sequence of SEQ ID NO:Y.

22. A method of identifying an activity in a biological assay, wherein the method comprises:
(a) expressing SEQ ID NO:X in a cell;
(b) isolating the supernatant;
(c) detecting an activity in a biological assay; and
(d) identifying the protein in the supernatant having the activity.

23. The product produced by the method of claim 20.

24. A method for preventing, treating, or ameliorating a medical condition, comprising administering to a mammalian subject a therapeutically effective amount of the polypeptide of claim 11.
